(19) United States
(12) Patent Application Publication
(10) Pub. No.: US 2011/0286916 A1
(43) Pub. Date: Nov. 24, 2011

(54) GENERATION AND CHARACTERIZATION OF ANTI-NOTCH ANTIBODIES FOR THERAPEUTIC AND DIAGNOSTIC USE

(76) Inventors: Jose Miguel Aste-Amezaga, Harleysville, PA (US); Ningyan Zhang, Ambler, PA (US); Fubao Wang, Dresher, PA (US); Andrew Bett, Lansdale, PA (US); Anna Demartis, Rome (IT); Maurizio Nuzzo, Rome (IT); Paolo Monaci, Rome (IT); Stephen Blacklow, Cambridge, MA (US); Jon Aster, Lexington, MA (US)

(21) Appl. No.: 13/130,441

(22) PCT Filed: Nov. 16, 2009
(86) PCT No.: PCT/US09/64520

§ 371 Date: Aug. 3, 2011

(30) Foreign Application Priority Data
Nov. 20, 2008 (US) 61/199753

(51) Int. Cl. A61K 39/395; C12N 1/20; A61P 35/00; A61K 49/00; A61K 51/10; C12N 9/96; C07K 16/28; G01N 33/53

(52) U.S. Cl. 424/1.49; 530/389.1; 530/387.3; 435/252.1; 435/252.8; 435/252.5; 435/253.3; 435/7.92; 435/7.23; 424/9.1; 424/172.1; 424/178.1; 530/391.7; 530/391.3; 435/188

(57) ABSTRACT

The present invention relates to mammalian antibodies, preferably fully human monoclonal antibodies and antigen-binding portions thereof that specifically bind to a cell surface receptor, wherein the receptor protein is a Notch1 receptor protein. Some of the disclosed antibodies bind Notch1 to the exclusion of other members of the Notch receptor family, while other antibodies bind Notch 1 and Notch3. Nucleic acid molecules encoding the Notch antibodies as well as methods of use thereof are also disclosed. Also included are pharmaceutical compositions comprising these antibodies and methods of using the antibodies and compositions thereof for treatment and diagnosis of pathological hyperproliferative oncogenic disorders associated with expression of Notch1 or Notch3 including aberrant activation of each of these receptors.

### FIELD OF THE INVENTION

[0001] The invention relates to prevention and treatment of diseases and conditions associated with aberrant Notch activity. This is accomplished through use of agonists or antagonists of Notch. A preferred agonist/antagonist is a monoclonal antibody having specificity for human Notch1 or Notch1/Notch3.

### BACKGROUND OF THE INVENTION

[0002] Intrinsic, cell-autonomous factors as well as non-autonomous, short-range and long-range signals guide cells through distinct developmental paths. An organism frequently uses the same signaling pathway within different cellular contexts to achieve unique developmental goals. Notch signaling is an evolutionarily conserved mechanism used to control cell fates through local cell interactions. Signals transmitted through the Notch receptor, in combination with other cellular factors, influence differentiation, proliferation and apoptotic events at all stages of development (Artavanis-Tsakonas et al., 1999, Science, 284, 770-776).

[0003] Notch proteins define a unique class of highly conserved transmembrane receptors regulating cell growth, differentiation, and death in different tissues of multicellular organisms (Artavanis-Tsakonas et al., 1999, Science 284, 770-776). Four mammalian Notch homologs have been identified and are designated Notch1, Notch2, Notch3 and Notch4. Human Notch1 (also known as Notch gene homolog 1 and TAN-1) was first identified in 1991 and later mapped to chromosome 9q34 through its involvement in chromosomal translocations found in human T-cell Acute Lymphoblastic Leukemias/Lymphomas (T-ALL) (Ellisen et al., 1991, Cell 66, 649-661).

[0004] Mature Notch proteins are heterodimeric receptors derived from the cleavage of Notch pre-proteins into an extracellular subunit containing multiple EGF-like repeats and a transmembrane subunit including the intracellular region (Blaumueller et al., Cell, 1997, 90, 281-291). Notch receptors are first synthesized as 300-350 kDa type I single-pass transmembrane glycoproteins. During maturation, Notch precursor polypeptides are proteolytically processed by a furin-like convertase at a site called S1. The resulting two associated subunits, here termed extracellular Notch (N^{EC}) and transmembrane Notch (N^{TM}), constitute the mature heterodimeric form of the protein present at the cell surface (Sanchez-Irizarry et al., 2004, Mol. Cell. Biol. 24, 9265-9273). The N^{EC} subunit contains EGF like repeats that include the region responsible for ligand binding. The EGF repeats are followed by a negative regulatory region (NRR) that participates in restraining premature activation of Notch receptors (Rand et al., 2000, Mol. Cell. Biol. 20, 1825-1835). The NRR includes three Notch-specific Lin12-Notch repeats (LNRs) and the heterodimerization domain (HD), which contains an additional 103-residue sequence up to the furin cleavage site (S1) as well as the extracellular portion of the N^{TM} subunit. The transmembrane segment of N^{TM} is followed by the intracellular region (ICN) that consists of a RAM domain, seven ankyrin repeats (ANK), a transactivation domain (TAD) and a C-terminal PEST region.

[0005] Notch activation results following the binding of ligand to the EGF repeats in the extracellular domain of Notch (Artavanis-Tsakonas et al., Science, 1995, 268, 225-232). Several Notch ligands have been identified in vertebrates, including Delta, Serrate and Jagged. The Notch ligands are also transmembrane proteins, having highly conserved structures. Upon binding of the ligands the N^{TM} subunit gets cleaved by a metalloprotease at S2, a site just external to the transmembrane domain (Mumm et al., 2000, Mol. Cell. 5, 197-206). This cleaved product (N^{TM}*) is subsequently proteolyzed again by an enzyme complex called gamma-secretase, with the final intramembrane cleavage occurring just internal to the inner membrane leaflet. Gamma-secretase cleavage results in release of the ICN. Upon its release, ICN travels to the nucleus and interacts with members of the CSL family of transcription factors, mediated through binding of the RAM and ANK fragments (Nam et al., 2003, J. Biol. Chem. 278, 21232-21239). Binding of ICN to CSL results in recruitment of proteins of the Mastermind family, and this ternary complex engages proteins like p300 and other factors to activate transcription of a variety of target genes. However, in the case of Notch1, the complex is short lived and is targeted for degradation by a C-terminal destruction box in its C-terminal PEST region (Aster, 2005, Int. J. Hematol. 82, 295-301).

[0006] In the context of experimental cancer immunotherapy, the Notch signaling network is acquiring increasing importance for its possible roles in neoplastic cells and the immune system (Jang et al., Curr. Opin. Mol. Ther., 2000, 2, 55-65). Larsson et al. predicted that the human Notch genes are proto-oncogenes and candidates for sites of chromosome breakage in neoplasia-associated translocations (Larsson et al., Genomics, 1994, 24, 253-258). The clearest example of oncogenic Notch signaling is found in T-acute lymphoblastic leukemia/lymphoma (T-ALL), an aggressive neoplasm of immature T-cells. Notch1 was identified through its involvement in a (7;9) chromosomal translocation found in approximately 1% of all T-ALLs (Ellisen et al., 1991, Cell 66:649-661). A much broader role was revealed in 2004, with the discovery of two types of activating mutations within Notch1, at least one of which is found in approximately 55-60% of human T-ALLs (Weng et al., 2004, Science 306:269-71). The first type involves the heterodimerization domain and causes changes in amino acid sequence that lead to ligand-independent metalloprotease cleavage at site S2 (Malecki et al., 2006, Mol. Cell. Biol. 26:4642-4651). The second consists of stop codon or frame shift mutations that result in deletion of the C-terminal PEST degron domain and stabilization of ICN1. These remove several possible phosphorylation sites and a conserved WSSSSP sequence that influences the phosphorylation, stability and leukemogenicity of Notch1 in murine models (Chiang et al., 2006, Mol. Cell. Biol. 26:6261-6271).

[0007] Synergistic heterodimerization domain and PEST domain mutations are found together in cis in 10-20% of human T-ALL, and low copy number amplifications of Notch1 in T-ALL has also been reported (van Vlierberghe et al., 2006, Leukemia 20:1245-1253). Notch1 mutations are found in combination with all other major known genetic aberrations associated with human T-ALL, and acquired secondary gain-of-function mutations in murine Notch1 have been identified in T-ALLs arising in many different genetic backgrounds (Lin et al., 2006, Blood 107:2540-2543). Transgenes encoding activated forms of Notch3 also cause T-ALL in mice (Bellavia et al., 2000, EMBO J 19:3337-3348). Similar to Notch1, these tumors are dependent on expression of a functional pre-T cell receptor (Bellavia et al., 2002, Proc Natl Acad Sci 99:3788-3793). Taken together, these data indicate that there is continued selection for increasing Notch signaling during T-ALL induction and progression, and that such mutations can be either initiating events or collaborating secondary events.

[0008] Notch3 gene amplification and pathway activation have also been reported in ovarian serous carcinoma. Cancer Res., 68:5716-23 (2008). Indeed copy number gain in Notch3 at chromosome 19p13.12 has been reported to occur in ˜20% of high-grade serous carcinomas, and overexpression of Notch3 was observed in nearly 50% of the cases examined, suggesting the significant role that Notch3 signaling contributes to tumor progression in ovarian cancer. Park et al., “Notch-3 gene amplification in ovarian cancer.” Cancer Res., 66:6312-8r (2006).

[0009] Beyond T-ALL, there is increasing evidence that Notch signals are oncogenic in other cellular contexts, particularly breast epithelium and melanocytes. To date, cell autonomous gain-of-function mutations in Notch receptors have not been found in human solid tumors, suggesting that ligand-mediated activation predominates in these contexts. The expression of Notch receptors is increased in the human breast and the expression of ligands such as Jagged1 correlates with a more aggressive disease course in breast cancer (Reedijk et al., 2005, Cancer Res. 65:8530-8537). Recent reports indicate that Notch1 signaling is increased in a variety of molecularly different types of breast cancers, and that such cancers are reverted to a more benign phenotype by enforced expression of Numb (Stylianou et al., 2006, Cancer Res. 66:1517-1525). There also appears to be an important positive oncogenic collaboration in breast cancer cells between Notch and Wnt, another pathway that was initially implicated in breast cancer through the analysis of retroviral insertions in murine tumors. Other work in breast cancer cell lines suggests that Notch1 inhibits p53-mediated apoptosis by stimulating signaling through the PI3K-Akt-mTOR-eIF4E pathway (Mungamuri et al., 2006, Cancer Res. 66:4715-4724) and antagonizes the growth suppressive effects of the TGF-β signaling pathway, possibly through the interaction of activated Notch1 with Smad3 (Sun et al., 2005, Oncogene 24:5365-5374).

[0010] The expression of Notch receptors and their downstream target genes is also upregulated in primary human melanomas, and enforced expression of constitutively active Notch1 promotes melanoma progression (Balint et al., 2005, J. Clin. Invest. 115:3166-3176). These oncogenic effects correlate with the activation of Wnt signaling in melanoma cells, which promotes the expression of adhesion molecules such as N-cadherin through the transcription factor TCF/LEF. Conversely, previous work suggests that Notch1 activation transmits anti-oncogenic signals in prostate cancer cells. Experiments performed using a murine model of prostate tumor formation suggests that Notch1 signals can inhibit prostate cancer progression. In addition, enforced expression of ICN1 inhibits the growth of various prostate cancer cell lines (Shou et al., 2001, Cancer Res. 61:7291-7297).

[0011] Disclosed and claimed in U.S. Pat. No. 5,789,195 are nucleic acid sequences encoding Notch genes. Antibodies to human Notch proteins are additionally provided (Artavanis-Tsakonas et al., 1998). Amino acid sequences of Notch genes and antibodies against Notch proteins are also disclosed and claimed in U.S. Pat. No. 6,090,922 (Artavanis-Tsakonas et al., 2000).

[0012] Disclosed in U.S. Pat. No. 6,083,904 and PCT publication WO 94/07474 are therapeutic and diagnostic methods and compositions based on Notch proteins and nucleic acids, wherein antisense methods are generally disclosed (Artavanis-Tsakonas, 2000; Artavanis-Tsakonas et al., 1994).

[0013] Currently, there are no known therapeutic agents that effectively modulate the activation of Notch receptors. Modulation of expression of Notch genes may prove to be a useful point for therapeutic intervention in developmental, hyperproliferative or autoimmune disorders or disorders arising from aberrant apoptosis.

[0014] In view of the importance of the Notch signaling pathway and its role in human cell differentiation and disease, there is a need in the art for identification of Notch modulators and for methods and therapeutic agents for intervening in diseases and conditions related to defects in the Notch pathway. Towards this end, the present invention provides antibodies specific for Notch1 or Notch1/Notch3 that are effective at preventing the Notch activated signaling cascade that has been implicated in various hyper-proliferative disorders. Compositions and methods for modulating expression of Notch genes, including expression of variants of Notch are also provided.

### SUMMARY OF THE INVENTION

[0015] Embodiments of this invention are made available by the development of antibodies that retain favorable affinity to the Notch receptor protein, particularly human Notch1 receptor protein. The antibodies described infra, (“Invention Antibodies”) offer an important new approach to the treatment of various disorders of cell fate, in particular hyperproliferative disorders (e.g., cancer). Disorders involving aberrant Notch receptor activation or undesirable levels of expression or activity of Notch1 protein are also included.

[0016] A broad aspect of the invention provides a plurality of anti-Notch antibodies, preferably anti-Notch1 monoclonal antibodies as well as those that bind Notch1 and Notch3 (Notch1/3). The monoclonal antibodies of the invention bind to the human Notch 1 receptor (Notch1) and can thus be useful in methods to treat or diagnose pathological hyperproliferative oncogenic disorders mediated by Notch1 expression or dysplastic cells associated with increased expression or activity of the Notch1 receptor protein.

[0017] An embodiment of this invention relates to the antibodies described herein, including the sequences of the VRs, FRs and CDRs polypeptides and the polynucleotides encoding them. Variant antibodies exemplified by diabody, bi-specific, trivalent & tetravalent antibodies or other antibodies derived from the herein described invention antibodies are also encompassed by the invention.

[0018] The invention particularly relates to at least one monoclonal antibody, or binding fragment thereof described herein that binds specifically to an antigen present in various cancers including but not limited to T cell acute Lymphoblastic leukemia (T-ALL) human breast cancer, human colon cancer, melanoma, human lung cancer and human prostate cancer, wherein the antigen is Notch1 (i) a polypeptide having a molecular weight of about 300 kDa as determined by SDS-PAGE under reducing conditions, which, upon activation, releases its cytoplasmic domain that travels to the nucleus. In another embodiment, some of the invention antibodies bind Notch1 and Notch3.

[0019] The invention also provides an isolated cell line that produces at least one anti-Notch1 antibody as described herein. An embodiment of the invention thus provides an isolated cell line which produces at least one or more of the monoclonal antibodies as detailed herein that binds specifically an antigen present in one of T cell acute Lymphoblastic leukemia (T-ALL), human breast cancer, human colon cancer, melanoma, human lung cancer and human prostate cancer, the antigen being Notch1 receptor protein (i) a polypeptide having a molecular weight of about 300 kDa as determined by SDS-PAGE under reducing conditions.

[0020] In certain embodiments, at least one invention described herein binds to the ligand binding domain of the Notch1 receptor.

[0021] In yet another embodiment, at least one antibody of the invention binds to the negative regulator region, resident in the extracellular domain of the Notch1 receptor.

[0022] In still another embodiment, at least one antibody of the invention is specific for a Notch1 receptor characterized by putative tumor-associated mutations associated with Notch signaling and HD domain stability.

[0023] It is understood that the term “antibody” includes “antibodies” such as one or more of the Notch1 specific antibodies described herein including those that also bind Notch3. As well, it includes monoclonal, polyclonal, multivalent, bispecific, and trivalent or optimized antibodies including fragments thereof. The invention also contemplates the use of single chains such as the variable heavy and light chains of the antibodies. Generation of any of these types of antibodies or antibody fragments is well known to those skilled in the art. In the present case, monoclonal antibodies to Notch1 receptor proteins have been generated and have been isolated and shown to have high affinity to Notch1. While the remaining discussion details Notch1 specific antibodies of the invention, the same discussion applies equally to those invention antibodies that bind Notch1 and Notch3.

[0024] The invention also includes modifications to the invention antibodies including variants thereof which do not significantly affect their binding properties. Such variants may have enhanced or decreased activity towards its binding partner.

[0025] Another embodiment of the invention encompasses monoclonal antibody or binding fragment thereof that may be Fab fragments, F(ab)2 fragments, Fab′ fragments, F(ab′)2 fragments, Fd fragments, Fd′ fragments or Fv fragments, Fv, scFv, scFv-Fc or diabodies or any functional fragment whose half-life would have been increased by a chemical modification, especially by PEGylation, or by incorporation in a liposome. It may also be an anti-idiotypic antibody. Plasma protein binding can be an effective means of improving the pharmacokinetic properties of otherwise short lived molecules.

[0026] One general strategy of reducing a therapeutic proteins intrinsic rate of clearance is via amino acid substitutions. In case of a protein, this strategy may entail amino acid substitutions that reduce receptor binding affinity in intracellular endosomal compartments, thereby leading to increased recycling in the ligand-sorting process and consequently resulting in longer half-life in extracellular medium. See Sarkar C. A., Lowenhaupt K., Horan T., Boone T. C., Tidor B., Lauffenburger D. A. Nat. Biotechnol. (2002) 20:908-913. A second approach is to express the therapeutic protein as a genetic fusion with a natural protein that has a long serum half-life; either 67 kDa serum albumin (SA)—Syed S., Schuyler P. D., Kulczycky M., Sheffield W. P. Blood (1997) 89:3243-3252) or the Fc portion of an antibody, which adds an additional 60-70 kDa in its natural dimeric form, depending on glycosylation (Mohler et al., J. Immunol., 151:1548-1561 (1993). As a consequence, an embodiment of the invention provides modifications to at least one antibody disclosed herein resulting in a fusion protein comprising an antibody of the invention fused to albumin. See Dennis et al., “Albumin binding as a general strategy for improving the pharmacokinetics of proteins.” J Biol Chem., 277:35035-43 (2002).

[0027] Glycosylated variants (Glycoforms) of the invention antibodies are also envisioned. In one embodiment of the invention, antibodies, or fragments thereof, are modified to reduce or eliminate potential glycosylation sites. The amino acids where carbohydrate, such as oligosaccharide, is attached are typically asparagine (N-linkage), serine (O-linkage), and threonine (O-linkage) residues. In order to identify potential glycosylation sites within an antibody or antigen-binding fragment, the sequence of the antibody is examined, for example, by using publicly available databases such as the website provided by the Center for Biological Sequence Analysis (see http://www.cbs.dtu.dk/services/NetNGlyc/ for predicting N-linked glycosylation sites) and http://www.cbs.dtu.dk/services/NetOGlyc/ for predicting O-linked glycosylation sites). Additional methods for altering glycosylation sites of antibodies are described in U.S. Pat. Nos. 6,350,861 and 5,714,350, the entire content of each of which is incorporated herein in its entirety. In order to improve the binding affinity of an antibody or antigen-binding fragment thereof, glycosylation sites of the antibody can be altered, for example, by mutagenesis (e.g., site-directed mutagenesis). Such modified antibodies having reduced glycosylation sites or carbohydrates relative to the unmodified form are referred to as “aglycosylated” antibodies. An “afucosylated” anti-Notch1 antibody derived from one or more antibodies described herein is representative of such an antibody that falls within the scope of the invention. See Li et al., Nat. Biotechnol., 24: 210-215 (2006); Shields, R. L. et al. Lack of fucose on human IgG1 N-linked oligosaccharide improves binding to human FcγRIII and antibody-dependent cellular toxicity. J. Biol. Chem. 277, 26733-26740 (2002). In alternative embodiment, the invention antibodies or antigen binding fragments thereof are modified to enhance glycosylation.

[0028] Fc engineered variants of the invention antibodies are also encompassed by the present invention. Such variants include antibodies or antigen binding fragments thereof which have been engineered so as to introduce mutations or substitutions in the Fc region of the antibody molecule so as to improve or modulate the effector functions of the underlying antibody molecule relative to the unmodified antibody. In general, improved effector functions is included to refer to such activities as CDC and ADCC. Further thereto, the invention provides Fc variants that have improved function and/or solution properties as compared to the aglycosylated form of the parent Fc polypeptide. Improved functionality herein includes but is not limited to binding affinity to an Fc ligand. Improved solution properties herein includes but is not limited to stability and solubility. In one embodiment, the proposed Fc variants bind to an FcγR with an affinity that is within about 0.5-fold of the glycosylated form of the parent Fc polypeptide. In an alternate embodiment, the aglycosylated Fc variants bind to an FcγR with an affinity that is comparable to the glycosylated parent Fc polypeptide. In an alternate embodiment, the Fc variants bind to an FcγR with an affinity that is greater than the glycosylated form of the parent Fc polypeptide.

[0029] Another broad aspect of the invention comprises an antibody or a binding fragment thereof that comprises a light chain comprising at least one complementarity determining region CDR having an amino acid sequence as set forth in one or more appendices detailed herein (see appendices III, IV and IV) or at least one CDR whose sequence has at least 80%, preferably 85%, 90%, 95% and 98% identity, after optimum alignment, with the sequences set forth in one or more appendices described herein or a heavy chain comprising at least one CDR comprising an amino acid sequence selected from the group set forth in one or more appendices set forth herein or at least one CDR whose sequence has at least 80%, preferably 85%, 90%, 95% and 98% identity, after optimum alignment, with said at least one CDR as set forth in one or more appendices set forth herein. Alternatively, the antibody of the invention comprises at least one heavy chain and/or a light chain comprising at least one amino acid sequence as set forth in one of Appendix III, IV or IX. Nucleic acid molecules comprising nucleotide sequences encoding at least one or more of the above referenced amino acid sequences are also contemplated.

[0030] The light chain may likewise comprise the amino acid sequence as set forth in one or more appendices detailed herein, while the heavy chain may comprise the amino acid sequence as set forth in one or more appendices set forth herein. See appendix III, IV or IX.

[0031] Antibodies that compete with any one or more of the antibodies described herein for binding with Notch 1 are also within the scope of the invention.

[0032] In recent years, various strategies have been developed for preparing scFv as a multimeric derivative. This is intended to lead, in particular, to recombinant antibodies with improved pharmacokinetic and biodistribution properties as well as with increased binding avidity. In order to achieve multimerisation of the scFv, scFv may be prepared as fusion proteins with multimerisation domains. The multimerisation domains may be, e.g. the CH3 region of an IgG or coiled coil structure (helix structures) such as Leucin-zipper domains. However, there are also strategies in which the interaction between the VH/VL regions of the scFv are used for the multimerisation (e.g. di-, tri- and pentabodies).

[0033] Also considered are multivalent antibody constructs that are Notch 1 antagonists or agonists. In one embodiment, a multivalent antibody construct comprises at least one antigen recognition site specific for Notch1 receptor protein. In certain embodiments, at least one of the antigen recognition sites is located on a scFv domain, while in other embodiments, all antigen recognition sites are located on scFv domains.

[0034] Also contemplated herein is a multivalent, multispecific antibody or fragment thereof comprising more than one antigen binding site having an affinity toward a Notch1 target antigen and one or more hapten binding sites having affinity towards hapten molecules. Also preferred, the multivalent, multispecific antibody or fragment thereof further comprises a diagnostic/detection and/or therapeutic agent.

[0035] The phrase “multivalent antibody” or “multivalent antibody construct” refers to an antibody or antibody construct comprising more than one antigen recognition site. For example, a “bivalent” antibody construct has two antigen recognition sites, whereas a “tetravalent” antibody construct has four antigen recognition sites. The terms “monospecific”, “bispecific”, “trispecific”, “tetraspecific”, etc. refer to the number of different antigen recognition site specificities (as opposed to the number of antigen recognition sites) present in a multivalent antibody construct of the invention. For example, a “monospecific” antibody construct's antigen recognition sites all bind the same epitope. A “bispecific” antibody construct has at least one antigen recognition site that binds a first epitope and at least one antigen recognition site that binds a second epitope that is different from the first epitope. A “multivalent monospecific” antibody construct has multiple antigen recognition sites that all bind the same epitope. A “multivalent bispecific” antibody construct has multiple antigen recognition sites, some number of which bind a first epitope and some number of which bind a second epitope that is different from the first epitope.

[0036] In still another embodiment, the antibody construct is monospecific. In still another embodiment, the multivalent antibody is tetravalent. In one embodiment of the invention, the antibody is a monospecific tetravalent antibody, wherein the antibody comprises four Notch1 antigen recognition sites. In still another embodiment, the antibody construct is specific for an epitope on Notch1.

[0037] In another embodiment of the invention, the antibody construct is bispecific. In one embodiment, the antibody construct has two Notch1-specific antigen recognition sites and two Notch3-specific recognition sites.

[0038] In another embodiment of the invention, the antibody construct is a trivalent antibody construct specific for the Notch1 receptor protein. In yet another embodiment, the invention contemplates an antibody construct having two Notch1-specific antigen recognition sites and two Notch3-specific recognition sites.

[0039] Other antibody constructs may be multispecific for different epitopes on human Notch1 receptor proteins. In any of the multispecific antibody constructs, at least one antigen recognition site may be located on a scFv domain, and in certain embodiments, all antigen recognition sites are located on scFv domains.

[0040] In one aspect, the invention provides an antibody fragment comprising: (i) a first polypeptide comprising a light chain variable domain (and in some embodiments further comprising a light chain constant domain), (ii) a second polypeptide comprising a heavy chain variable domain, a first Fc polypeptide sequence (and in some embodiments further comprising a non-Fc heavy chain constant domain sequence), and (iii) a third polypeptide comprising a second Fc polypeptide sequence. Generally, the second polypeptide is a single polypeptide comprising a heavy chain variable domain, heavy chain constant domain (e.g., all or part of CH1) and the first Fc polypeptide. For example, the first Fc polypeptide sequence is generally linked to the heavy chain constant domain by a peptide bond [i.e., not a non-peptidyl bond]. In one embodiment, the third polypeptide comprises an N-terminally truncated heavy chain which comprises at least a portion of a hinge sequence at its N terminus. In one embodiment, the third polypeptide comprises an N-terminally truncated heavy chain which does not comprise a functional or wild type hinge sequence at its N terminus. In some embodiments, the two Fc polypeptides of an antibody of the invention or a fragment thereof are covalently linked. For example, the two Fc polypeptides may be linked through intermolecular disulfide bonds, for instance through intermolecular disulfide bonds between cysteine residues of the hinge region.

[0041] In one aspect, the invention provides a composition comprising a population of immunoglobulins wherein at least (or at least about) 50%, 75%, 85%, 90%, 95% of the immunoglobulins are antibody fragments of the invention. A composition comprising said population of immunoglobulins can be in any of a variety of forms, including but not limited to host cell lysate, cell culture medium, host cell paste, or semi-purified or purified forms thereof. Purification methods are well known in the art, some of which are described herein.

[0042] Another embodiment of the invention provides a Notch1-specific diabody antibody. By diabody the skilled person means a bivalent homodimeric scFv derivative (Hu et al., 1996, PNAS 16: 5879-5883). The shortening of the Linker in an scFv molecule to 5-10 amino acids leads to the formation of homodimers in which an inter-chain V_{H}/N_{L}-superimposition takes place. Diabodies may additionally be stabilized by the incorporation of disulphide bridges. Examples of diabody-antibody proteins from the prior art can be found in Perisic et al. (1994, Structure 2: 1217-1226).

[0043] By minibody the skilled person means a bivalent, homodimeric scFv derivative. It consists of a fusion protein which contains the CH3 region of an immunoglobulin, preferably IgG, most preferably IgG1 as the dimerisation region which is connected to the scFv via a Hinge region (e.g. also from IgG1) and a Linker region. The disulphide bridges in the Hinge region are mostly formed in higher cells and not in prokaryotes. Preferably the minibody is a Notch1-specific minibody antibody fragment. Examples of minibody-antibody proteins from the prior art can be found in Hu et al. (1996, Cancer Res. 56: 3055-61).

[0044] By triabody the skilled person means a: trivalent homotrimeric scFv nderivative (Kortt et al. 1997 Protein Engineering 10: 423-433). ScFv derivatives wherein VH-VL are fused directly without a linker sequence lead to the formation of trimers.

[0045] The skilled person will also be familiar with so-called mini antibodies which have a bi-, tri- or tetravalent structure and are derived from scFv. The multimerisation is carried out by di-, tri- or tetrameric coiled coil structures (Pack et al., 1993 Biotechnology II:, 1271-1277; Lovejoy et al. 1993 Science 259: 1288-1293; Pack et al., 1995 J. Mol. Biol. 246: 28-34).

[0046] Therefore, an alternative embodiment proposes a Notch1-specific multimerised molecule based on the abovementioned antibody fragments and may be, for example, a triabody, a tetravalent mini antibody or a pentabody.

[0047] A related aspect of the invention provides monoclonal antibodies or functional fragments thereof that specifically binds human Notch1 with specified affinities. In certain embodiments, these antibodies bind human Notch1 with an ED₅₀ in the range of about 10 pM to about 500 nM. In certain embodiments, these antibodies bind human Notch1 with an ED₅₀ in the range of about 500 pM to about 300 nM.

[0048] The present invention further provides an antibody-recognized surface antigen present on host cell, including but not limited to T-cell acute lymphoblastic leukemia/lymphoma, human colon cancer, melanoma, human lung cancer and human prostate cancer, the antigen being Notch1 (i) a polypeptide having a molecular weight of about 300 kDa as determined by SDS-PAGE under reducing conditions or a biologically equivalent variant or fragment thereof.

[0049] Also provided is a monoclonal antibody of the invention or a binding fragment thereof that is bound to a solid matrix.

[0050] Antibodies to Notch1 as described herein may also be used in production facilities or laboratories to isolate additional quantities of the proteins, such as by affinity chromatography. For example, the antibodies of the invention may also be utilized to isolate additional amounts of Notch1.

[0051] In one aspect, the invention provides isolated, purified or recombinant polypeptides having an amino acid sequence that is at least 90%, 95%, 98% or 99% identical to an amino acid sequence as set forth in one or more appendices herein described. In certain embodiments the application provides an amino acid sequence that is at least 90%, 95%, 98%, 99%, 99.3%, 99.5% or 99.7% identical to the target amino acid sequence herein described.

[0052] The present invention further relates to a polynucleotide encoding an antibody of the invention. In accordance therewith, the invention further provides: isolated nucleic acid encoding the inventive antibodies disclosed herein including the heavy and/or light chain or antigen-binding portions thereof. Thus, an aspect of the invention provides isolated nucleic acid molecules selected from the nucleotide sequences described in any one or more of the appendices detailed herein. A related aspect is drawn to (a) a nucleic aid molecule described in any one or more of the appendices detailed herein encoding one or more of the sequence of amino acids as set forth in one or more of the appendices described herein; or (b) the nucleotide sequence that hybridizes to the nucleotide sequence of (a) under moderately stringent conditions, or (c) a nucleic acid molecule comprising a nucleotide sequence that is a degenerate sequence with respect to either (a) or (b) above, or (d) splice variant cDNA sequences thereof or (e) a nucleic acid of at least 18 nucleotides capable of hybridizing under conditions of great stringency with at least one of the CDRs of nucleic acid sequence described in one or more of the appendices described herein or with a sequence having at least 80%, preferably 85%, 90%, 95% and 98%, identity after optimum alignment with the sequence as set forth in one or more of the appendices detailed herein.

[0053] A vector comprising the nucleic acid molecule described above, optionally, operably linked to control sequences recognized by a host cell transformed with the vector is also provided as is a host cell transformed with the vector. The cells transformed according to the invention can be used in processes for preparation of recombinant antibody disclosed herein. A variety of host cells can be transformed with the nucleic acid molecules encoding the antibody or a fragment thereof. The host cell can be chosen from prokaryotic or eukaryotic systems, for example bacterial cells but likewise yeast cells or animal cells, in particular mammalian cells. It is likewise possible to use insect cells or plant cells. Methods of producing a recombinant protein are well known.

[0054] The invention likewise concerns animals, except man, which comprise at least one cell transformed according to the invention. Thus, non-human transgenic animals that express the heavy and/or light chain or antigen-binding portions thereof of an anti-Notch1 antibody are also provided.

[0055] The present invention further provides a pharmaceutical composition comprising the monoclonal antibody, or binding fragment thereof, according to the invention, and a pharmaceutically acceptable carrier, excipient, or diluent. The pharmaceutical composition may further comprise another component, such as an anti-tumor agent or an imaging reagent.

[0056] Certain embodiments of the invention relate to the use of the invention antibodies as targeted delivery systems for cytotoxic agents such as chemotherapeutic drugs, peptides or radionuclides, for immunological response promoters such as cytokines, for pro-drugs or for gene therapies. As well, the antibodies described herein may also transport/deliver payloads such as RNAi or shRNA. These payloads may be naked or chemically modified. Immunoliposomes as potential delivery vehicles are also included.

[0057] As will be appreciated by one skilled in the art, the antibodies of the invention or binding fragments thereof will also find use in various medical or research purposes, including staging of various pathologies associated with expression of Notch1. Indeed, laboratory research may also be facilitated through use of such antibodies. Identifying patients at risk of a pathological effect of an oncogenic disorder associated with expression of Notch1, particularly hyperproliferative oncogenic disorders such as, but not limited to, T cell acute Lymphoblastic leukemia (T-ALL), human breast cancer, human colon cancer, melanoma, human lung cancer and human prostate cancer is also encompassed. As would be recognized by one of ordinary skill in this art, the level of antibody expression associated with a particular disorder will vary depending on the nature and/or the severity of the pre-existing condition.

[0058] As a consequence, additional embodiments of the invention pertain to the use of the invention antibodies for detecting dysplastic or neoplastic Notch1 bearing cells as well as diagnosing, assessing and treating disorders associated with expression of Notch1 receptor protein or aberrant activation of the Notch cascade.

[0059] As used herein, the term “an oncogenic disorder associated with expression of Notch1” is intended to include diseases and other disorders in which the presence of high levels or abnormally low levels of Notch1 receptor protein (aberrant) in a subject suffering from the disorder has been shown to be or is suspected of being either responsible for the pathophysiology of the disorder or a factor that contributes to a worsening of the disorder. Thus, “neoplastic cells” or “neoplasia associated with expression of Notch1” or “dysplastic cells associated with expression of Notch1” which are used interchangeably refer to abnormal cells or cell growth characterized by increased or decreased expression levels of Notch1 relative to normal. Such transformed cells proliferate without normal homeostatic growth control resulting in a condition marked by abnormal proliferation of cells of a tissue—cancer. Alternatively, such disorders may be evidenced by an increase in the levels of Notch1 on the cell surface or in increased ICD levels in the affected cells or tissues of a subject suffering from the disorder. The increase in Notch1 levels may be detected, for example, using an anti-Notch1 antibody as described above. More, it refers to cells which exhibit relatively autonomous growth, so that they exhibit an aberrant growth phenotype characterized by a significant loss of control of cell proliferation. Alternatively, the cells may express normal levels of Notch1 but are marked by abnormal proliferation. Not all neoplastic cells are necessarily replicating cells at a given time point. The cells defined as neoplastic cells consists of cells in benign neoplasms and cells in malignant (or frank) neoplasms. Frankly, neoplastic cells are frequently referred to as cancer, typically termed carcinoma if originating from cells of endodermal or ectodermal histological origin, or sarcoma if originating from cell types derived from mesoderm.

[0060] In certain embodiments, “increased expression” as it relates to Notch1 refers to protein or gene expression levels that demonstrate a statistically significant increase in expression (as measured by RNA expression or protein expression) relative to a control. As well “increased expression” is also used to encompass “increased activation of the Notch cascade”. Thus, in some disorders associated with expression of Notch1, the level of expression of Notch1 may not be increased relative to a control but the level of activation of the Notch cascade may be increased relative to a control or a patient without the disease.

[0061] Administration of the antibodies of the present invention in any of the conventional ways known to one skilled in the art (e.g., topical, parenteral, intramuscular, IV, subcutaneous etc.), will provide an extremely useful method of detecting dysplastic cells in a sample as well as allowing a clinician to monitor the therapeutic regiment of a patient undergoing treatment for a hyperproliferative disorder associated with or mediated by expression of Notch1.

[0062] It is known in the art to use antibodies to detect the presence or expression of a specific protein. Because Notch1 may be overexpressed in certain hyperproliferative disorders including, for example, cancer, Notch1-specific antibodies of this invention may be used to detect the overexpression and, thus, to detect metastatic disease. As well, the immunodetection methods of the present invention may be of utility in the diagnosis of various disease states. As well, the invention antibodies may be exploited to detect differential expression of Notch1 in metastatic cells. As will be apparent to the skilled artisan human Notch1 or ICD or any other downstream target may be detected in a number of ways such as by various assays. Immunodetection techniques include but are not limited to immunohistological staining, western blotting, dot blotting, precipitation, agglutination, ELISA assays, immunohistochemistry, in situ hybridization, flow cytometry or radio-immunoassay (RIA) technique or equivalent on a variety of tissues and a variety of sandwich assays. These techniques are well known in the art. See, for example, U.S. Pat. No. 5,876,949, hereby incorporated by reference.

[0063] When used with suitable labels or other appropriate detectable biomolecule or chemicals, the antibodies described herein are particularly useful for in vitro and in vivo diagnostic and prognostic applications. Suitable conditions for which the antibody of the invention will find particular use for include the detection and diagnosis of neoplasias, such as, but not limited to cancer of the ovary, prostate, colon and skin. Inflammatory responses or disorders triggered by Notch receptor activation or cascade area also included.

[0064] Labels for use in immunoassays are generally known to those skilled in the art and include enzymes, radioisotopes, and fluorescent, luminescent and chromogenic substances, including colored particles such as colloidal gold or latex beads. Various types of labels and methods of conjugating the labels to the antibodies of the invention are well known to those skilled in the art, such as the ones set forth below.

[0065] In accordance with the above, an illustrative embodiment provides a method for detecting normal, benign, hyperplastic, and/or cancerous cells or a portion thereof in a biological sample comprising: providing a Notch1 antibody or binding portion thereof which recognizes an antigen (Notch1) on the surface of the cells, wherein the antibody or binding portion thereof binds to an epitope of Notch which is also recognized by any one or more monoclonal antibodies detailed herein and wherein the antibody or binding portion thereof is bound to a label effective to permit detection of the cells or a portion thereof upon binding of the antibody or binding portion thereof to the antigen; contacting the biological sample with the antibody or binding portion thereof having a label under conditions effective to permit binding of the antibody or binding portion thereof to the antigen on any of the cells or a portion thereof in the biological sample; and detecting the presence of any of the cells or a portion thereof in the biological sample by detecting the label.

[0066] In certain embodiments, the step of contacting the antibody is carried out in a living mammal and comprises: administering the Notch1 antibody or binding portion thereof to the mammal under conditions effective to permit binding of the antibody or binding portion thereof to the antigen on any of the cells or a portion thereof in the mammal.

[0067] In certain embodiments, the invention antibodies may be labeled with a detectable moiety, such as a fluorophore, a chromophore, a radionuclide, a chemiluminescent agent, a bioluminescent agent and an enzyme.

[0068] Yet another embodiment of the invention provides a method of diagnosis, preferably in vitro, of illnesses connected with an overexpression or under expression, preferably overexpression of the Notch1 receptor. Samples are taken from the patient and subject to any suitable immunoassay with Notch1 specific antibodies to detect the presence of Notch1. Preferably, the biological sample is preferably tissue sample or biopsies of human origin which can be conveniently assayed for the presence of a pathological hyperproliferative oncogenic disorder associated with expression of Notch1.

[0069] Once a determination is made of the amount of Notch1 present in the test sample, the results can be compared with those of control samples, which are obtained in a manner similar to the test samples but from individuals that do not have or present with a hyperproliferative oncogenic disorder associated with expression of Notch1, e.g., ovarian cancer. If the level of the Notch1 receptor polypeptide is significantly elevated in the test sample, it may be concluded that there is an increased likelihood of the subject from which it was derived has or will develop said disorder, e.g., T-ALL. The diagnostic uses of the antibodies according to the present invention embrace primary tumors and cancers, as well as metastases. Preferably, the antibody, or one of its functional fragments, can be present in the form of an immunoconjugate or of a labeled antibody so as to obtain a detectable and/or quantifiable signal.

[0070] An exemplary in vitro method of diagnosing pathological hyperproliferative oncogenic disorder comprises: (a) determining the presence or absence of Notch1 bearing cells in a sample; and (b) diagnosing a pathological condition or a susceptibility to a pathological condition based on the presence or absence of said Notch1 bearing cells. In the clinical diagnosis or monitoring of patients with an Notch1 mediated neoplastic disease, the detection of Notch1 expressing cells or an increase in the levels of Notch1, in comparison to the levels in a corresponding biological sample from a normal subject or non-cancerous tissue is generally indicative of a patient with or suspected of presenting with an Notch1 mediated disorder.

[0071] A representative in vitro method of diagnosing the presence of cancer in a patient or a susceptibility to a pathological condition associated therewith in a subject, proposes: (a) measuring the levels of Notch1 receptor protein in cells or tissues of the patient; and (b) comparing the measured levels of the antigen of (a) with levels of the antigen (Notch1 receptor protein) in cells or tissues from a normal human control, wherein an increase in the measured levels of the antigen in the patient versus the normal control is associated with the presence of the cancer. In certain embodiments, decreased Notch1 expression may be diagnostic of a pathological condition such as disorders of the skin. Alternatively, one may measure the level of the ICD as a measure of Notch receptor activation.

[0072] Alternatively, the above method may be practiced over several time points. A representative embodiment thus provides a method of diagnosing a pathological oncogenic disorder associated with aberrant expression of Notch 1 or increased Notch1 receptor activation (Notch cascade) comprising the steps of: a) detecting the presence and level of Notch1 in a biological sample obtained from the mammal at a plurality of time points, wherein Notch1 is detected by a method selected from the group consisting of immunoblotting, western blotting, immunoperoxidase staining, fluorescein labeling, diaminobenzadine and biotinylation; and b) correlating change in Notch1 expression with said diagnosis. It is understood that other conventional assays may be used instead of or in addition to those described herein.

[0073] A method of monitoring metastatic potential of an oncogenic disorder associated with Notch1 expression in a mammal is also encompassed. In accordance therewith, provided herein is a method for screening for metastatic potential of solid tumors comprising: a) obtaining a sample of tumor tissue from an individual in need of screening for metastatic potential of a solid tumor; b) reacting an antibody to Notch1 with tumor tissue from the patient; c) detecting the extent of binding of the Notch1 antibody to the tissue and d) correlating the extent of binding of the antibody with its metastatic potential. Preferably, the tumor is cancer arising from large bowel (colorectal cancer), prostate, breast or skin (melanoma or T-ALL). In certain embodiments, step c) may be performed over a plurality of time points. As well, in certain embodiments, Notch1 expression is detected by a method selected from the group consisting of immunohistochemical staining, immunoblotting, western blotting, immunoperoxidase staining, fluorescein labeling, diaminobenzadine and biotinylation.

[0074] The invention further provides for a method for predicting susceptibility to cancer comprising detecting the expression level of Notch1 in a tissue sample, its presence indicating susceptibility to cancer, wherein the degree of Notch1 expression correlates to the degree of susceptibility. In certain embodiments, the expression of Notch1 in, for example, breast tissue, prostate tissue, colon tissue, or any other tissue suspected of cells expressing Notch1 is examined, with the presence of Notch 1 in the sample providing an indication of cancer susceptibility or the emergence or existence of a tissue specific tumor.

[0075] Stage determination has potential prognostic value and provides criteria for designing optimal therapy. Simpson et al., J. Clin. Oncology 18:2059 (2000). Generally, pathological staging of breast cancer for example, is preferable to clinical staging because the former gives a more accurate prognosis. However, clinical staging would be preferred if it were as accurate as pathological staging because it does not depend on an invasive procedure to obtain tissue for pathological evaluation. Thus, methods for gauging tumor aggressiveness are also provided as are methods for observing the progression of a malignancy in an individual over time.

[0076] Accordingly, the invention provides an in vivo imaging reagent comprising an antibody according to the invention, or one of its functional fragments, preferably labeled, especially radiolabeled, and its use in medical imaging, in particular for the detection of Notch1 mediated disorders e.g., cancer characterized by over expressing Notch1 or other pathologies in which cells over express Notch1.

[0077] The imaging reagents, e.g., diagnostic reagents can be administered by intravenous injection into the body of the patient, or directly into a tissue suspected of harboring Notch1 bearing cells, e.g., colon or ovary or the pancreas. The dosage of reagent should be within the same ranges as for treatment methods. Typically, the reagent is labeled, although in some methods, the primary reagent with affinity for Notch1 is unlabelled and a secondary labeling agent is used to bind to the primary reagent. The choice of label depends on the means of detection. For example, a fluorescent label is suitable for optical detection. Use of paramagnetic labels is suitable for tomographic detection without surgical intervention. Radioactive labels can also be detected using PET or SPECT.

[0078] Diagnosis is performed by comparing the number, size, and/or intensity of labeled loci, to corresponding baseline values. The baseline values can, as an example, represent the mean levels in a population of undiseased individuals. Baseline values can also represent previous levels determined in the same patient. For example, baseline values can be determined in a patient before beginning treatment, and measured values thereafter compared with the baseline values. A decrease in values relative to baseline signals a positive response to treatment.

[0079] Thus, a general method embodied by the invention works by administering to a patient an imaging-effective amount of an imaging reagent such as the above described monoclonal antibodies or antigen-binding fragments which are labeled and a pharmaceutically effective carrier and then detecting the agent after it has bound to Notch1 present in the sample.

[0080] In certain embodiments, the method works by administering an imaging-effective amount of an imaging agent comprising a targeting moiety and an active moiety. The targeting moiety may be an antibody, Fab, Fab′2, a single chain antibody or other binding agent that interacts with an epitope present in Notch1. The active moiety may be a radioactive agent, such as radioactive technetium, radioactive indium, or radioactive iodine. The imaging agent is administered in an amount effective for diagnostic use in a mammal such as a human and the localization and accumulation of the imaging agent is then detected. The localization and accumulation of the imaging agent may be detected by radionuclide imaging, radioscintigraphy, nuclear magnetic resonance imaging, computed tomography, positron emission tomography, computerized axial tomography, X-ray or magnetic resonance imaging method, fluorescence detection, and chemiluminescent detection.

[0081] The in vivo imaging methods of the present invention are also useful for providing prognoses to cancer patients. For example, the presence of Notch1 indicative of an aggressive cancer likely to metastasize or likely to respond to a certain treatment can be detected. Thus, in one aspect, the invention provides a method for observing the progression of a malignancy in an individual over time comprising determining the level of Notch1 expressed by cells in a sample of the tumor, comparing the level so determined to the level of Notch1 expressed in an equivalent tissue sample taken from the same individual at a different time, wherein the degree of Notch1 expression in the tumor sample over time provides information on the progression of the cancer.

[0082] The in vivo imaging methods of the present invention can further be used to detect Notch1 mediated cancers e.g., one that has metastasized in other parts of the body.

[0083] A related embodiment relates to a pharmaceutical composition for in vivo imaging of an oncogenic disorder associated with expression of Notch1 comprising the invention antibodies or binding fragment thereof which is labeled and which binds Notch1 in vivo; and a pharmaceutically acceptable carrier.

[0084] The antibodies disclosed herein may also be used in methods of identifying human tumors that can escape anti-Notch1 treatment by observing or monitoring the growth of the tumor implanted into a rodent or rabbit after treatment with a conventional anti-Notch1 antibody.

[0085] The antibodies of the invention can also be used to study and evaluate combination therapies with anti-Notch1 antibodies of this invention and other therapeutic agents. The antibodies and polypeptides of this invention can be used to study the role of Notch1 in other diseases by administering the antibodies or polypeptides to an animal suffering from the disease of a similar disease and determining whether one or more symptoms of the disease are alleviated.

[0086] Those of skill in the art are very familiar with differentiating between significant expression of a target antigen, e.g., Notch1, which represents a positive identification, and low level or background expression of the antigen. Indeed, background expression levels are often used to form a “cut-off” above which increased staining will be scored as significant or positive. Significant expression may be represented by high levels of antigens in target cells or tissues or alternatively, by a high proportion of cells from within a tissue that each give a positive signal.

[0087] The above diagnostic approaches can be combined with any one of a wide variety of prognostic and diagnostic protocols known in the art. For example, another embodiment of the invention is directed to methods for observing a coincidence between the expression of Notch1 and a factor that is associated with malignancy, as a means for diagnosing and prognosticating the status of a tissue sample. A wide variety of factors associated with malignancy can be utilized, such as the expression of genes or gene products associated with malignancy (e.g. ICD, Hes1, Numb, Hes5 etc) as well as gross cytological observations. Methods for observing a coincidence between the expression of Notch1 and another factor that is associated with malignancy are useful, for example, because the presence of a set of specific factors that coincide with disease provides information crucial for diagnosing and prognosticating the status of a tissue sample. The methods proposed herein can be useful to diagnose or confirm diagnosis of an oncogenic disorder associated with expression of Notch1 or susceptibility thereof. For example, the methods can be used on a patient presenting with symptoms of an oncogenic disorder. If the patient has, for example increased expression levels of Notch1 or aberrant Notch receptor activation as evidenced by increased expression levels of any one or more downstream targets effected by or related to Notch receptor activation or increased expression levels of ICD, then the patient is likely suffering from a cancerous disorder. The methods can also be used in asymptomatic patients. Presence of higher than normal Notch1 may indicate for example susceptibility to future symptomatic disease. As well, the methods are useful for monitoring progression and/or response to treatment in patients who have been previously diagnosed with an Notch1 mediated cancer.

[0088] Generally speaking, malignancies are characterized by either increased Notch1 receptor expression, increased or aberrant Notch receptor activation or mutations resident in the Notch1 receptor protein. Malignancies characterized by aberrant or increased Notch receptor activation may be confirmed via determination of expression levels of ICD, whose expression level may be increased in the cytoplasm following activation of the Notch cascade. Thus, in those cases where a malignancy is characterized by increased Notch receptor activation, one is expected to find increased expression of ICD in the cytoplasm. This increase in ICD expression can be traced to the translocation of the ICD into the cytoplasm upon Notch receptor activation. A similar effect should be observed for downstream targets effected by aberrant Notch receptor activation—a decrease or increase relative to normal of a specific downstream Notch target occurring as a result of Notch receptor activation. Thus, measurement of Notch1 in biopsied tissue or other biological sample can be corroborated by determining expression of downstream target expression as a means of identifying high risk patients. In certain embodiments, single or multiple determinations of increased Notch1 expression and/or ICD expression over time may serve as a marker for illness indicative of intervening medical intervention. A positive test can therefore supplement the clinician's judgment.

[0089] Increased Notch1 levels also add prognostic accuracy to established severity of illness scores. Such clinical judgments will benefit by a method of scoring diseased cells. As discussed herein, measurement of Notch1 expression in a tissue sample can also be used as an indicator for additional monitoring or testing, or consideration for more aggressive treatment, especially when patients are found to have increased Notch1 expression levels or increased Notch receptor activation as reflected by increased cytoplasmic ICD levels or any other downstream target.

[0090] Thus, for example, one would expect that a patient at risk of developing a Notch mediated cancer or presenting with such a cancer would likely have increased Notch1 expression relative to a control sample. As such, in certain embodiments, for such patients, a semiquantitative estimation of Notch1 immunoreactivity can be performed. Towards this end, a score can be given to each slide, considering the intensity of the stain. The slides may be examined and scored independently by two investigators, and discordances may be reconciled by re-examination of the slide, and the scores then averaged. The intensity of immunostaining of individual cells may be scored on a scale of 0 (no staining) to 4 (strongest intensity) and the percentage of cells with staining at each intensity estimated. If there is no staining, a 0 score can be given. A +1 score indicates weak staining, while a +4 score indicating strong intensity of staining. As will be appreciated, any scoring scheme used to compare staining intensities may be used as long as it takes into account the relative intensity of cytoplasmic staining and allows differentiation among degrees of intensity of staining, thus providing a way to grade the malignancies. Because of the novel staining aspects of the present invention which results in highly differentiated staining, the scoring or grading can be done visually, thus allowing the technique of the present invention to be widely used clinically without sophisticated equipment. It will be understood that the staining results can be analyzed by appropriate sensitive optical equipment and analyzed by computer.

[0091] In furtherance of the above objective, the invention provides a method for diagnosing an oncogenic disorder associated with expression of Notch1 comprising: a) measuring by radioimmunoassay, competitive-binding assay, Western blot analysis, ELISA assay, or sandwich assay the amount of Notch1 protein in a biological sample, e.g., biopsied tissue obtained from a patient, using an antibody that specifically binds to Notch1; and b) comparing the amount of antibody bound to said Notch1 protein to a normal control tissue sample, wherein increased expression or over-expression of Notch1 in the sample obtained from the patient relative to the normal control tissue sample is diagnostic of an oncogenic disorder associated with expression of Notch1. Preferably, the Notch1-specific antibody comprises at least one antibody detailed herein.

[0092] In certain embodiment, the same scoring criteria e.g., score of 0 to 4 may be used to score cytoplasmic ICD staining as a means of corroborating the initial diagnosis. Consequently, cells may be stained with an antibody specific for ICD and the intensity level scored using the above criteria, where the intensity of immunostaining of individual cells may be scored on a scale of 0 (no staining) to 4 (strongest intensity) and the percentage of cells with staining at each intensity estimated. If there is no staining, a 0 score can be given. A +1 score indicates weak staining, while a +4 score indicating strong intensity of staining.

[0093] In additional embodiments, a prognostic index is produced by preparing a weighted scale of expression levels of the tumor markers, Notch1 and/or Notch1+Notch3 related to progression observed in a representative sample of a particular tumor type, wherein the different values in the weighted scale are related to increased invasiveness or metastatic spread in the representative sample.

[0094] The methods of the invention are also useful for identifying a human cancer patient at risk for additional neoplastic disease, for staging malignant disease in a human cancer patient and assessing the relative risk of metastatic disease versus the risk of toxicity (such as leukocytopenia, for example) from chemotherapeutic treatment.

[0095] The invention thus provides methods wherein the results of the determination of the level of cell surface Notch1 expression and the extent of cytoplasmic localization of ICD are used to prepare a prognostic or “risk” index for making a prognostic determination. In this aspect of the invention, a prognostic index is prepared using the above criteria, wherein a value of 0 signifies a control, a value of +1 indicates weak staining etc, wherein a prognosis of a likelihood of progressing to metastatic disease is made when the staining intensity is scoffed at +4.

[0096] An illustrative embodiment of the invention provides a diagnostic or monitoring method comprising: a) obtaining a sample of tissue from an individual in need of diagnosis or monitoring for cancer; b) detecting levels of Notch1 protein in said sample, c) scoring said sample for Notch1 protein levels; and d) comparing said scoring to that obtained from a control tissue sample to determine the prognosis associated with said cancer. Samples may be scored using a scale of 0 to 4, where 0 is negative (no detectable Notch1 expression or level comparable to a control level), and 4 is high intensity staining in the majority of cells and wherein a score of 1 to 4 indicates a poor prognosis while a score of 0 indicates a good prognosis.

[0097] A related aspect of the invention pertains to a method for screening for metastatic potential of a Notch1 mediated hyperproliferative disorder comprising: a) obtaining a sample of diseased or target tissue from an individual in need of screening for metastatic potential of a Notch1 mediated tumor, b) reacting an antibody to Notch1 with tumor tissue from the patient, c) detecting the extent of binding of the Notch1 antibody to said tissue and d) correlating the extent of binding of said antibody with its metastatic potential. In general, any of the methods of the invention involving analysis of the levels of Notch1 or ICD may be used in conjunction with additional cancer markers readily known to those of skill in the art.

[0098] Also provided is a method of detecting the presence and extent of cancer in a patient, comprising: determining the level of the antigen (Notch1) in a sample of cells or a tissue section from the patient and correlating the quantity of the antigen with the presence and extent of the cancer disease in the patient relative to a normal or control patient.

[0099] One of the major challenges facing the pharmaceutical industry in drug development is to show efficacy associated with a potential therapeutic candidate. This drawback applies equally to the numerous efforts underway in the pharmaceutical industry to generate anti-Notch1 inhibitory antibodies as anti-cancer therapeutics. One way to do this is to have a suitable marker that indicates when Notch1 activity is inhibited. Ideally, where a candidate Notch1 antagonist moiety is effective, one should observe a decrease in the expression levels of Notch1 following treatment with the Notch1 antagonist moiety. Alternatively, one might expect a decrease in the levels of ICD that is cleaved after Notch1 cascade is activated. It thus follows that favorable treatment with an Notch1 antagonistic moiety would predict a decrease in Notch1 expression levels on tumor cells or any other cells that express this cell surface receptor, while an unfavorable outcome would predict either no change in the expression levels or an increase in expression levels of Notch1. Thus, by measuring Notch1 protein expression on a tumor cell, for example, with a suitable marker, decreased expression levels may be detected as an indicator of suppressed Notch1 activity. The present invention exploits the ability of the Notch1 antibodies of the invention to bind Notch1 with high affinity to be utilized in a “biomarker strategy” for measuring Notch1 activity and/or expression or tumorigenic status by specifically measuring the expression levels of Notch1 on tumor/cancer cells. As a consequence, the present invention provides a rapid means, e.g., high affinity anti-Notch1 antibodies, for assessing the nature, severity and progression of a pathological hyperproliferative oncogenic disorder associated with expression of Notch1.

[0100] In furtherance of the “biomarker strategy” noted above, the invention provides a method for determining onset, progression, or regression, of neoplasias associated with expression of Notch1 in a subject, comprising: obtaining from a subject a first biological sample at a first time point, contacting the first sample with a effective amount of an antibody described herein under conditions allowing for binding of the antibody or a fragment thereof to Notch1 suspected to be contained in the sample and determining specific binding between the antibody in the first sample and Notch1 bearing cells to thereby obtain a first value, obtaining subsequently from the subject a second biological sample at a second time point, and contacting the second biological sample with the Notch1 antibody and determining specific binding between the antibody and Notch1 in said sample to obtain a second value, and comparing the determination of binding in the first sample to the determination of specific binding in the second sample as a determination of the onset, progression, or regression of the colon cancer, wherein an increase in expression level of Notch1 in said second or subsequent sample relative to the first sample indicative of the progression of said neoplasias, and wherein decrease in indicative of regression of neoplasias in said sample. The diagnosis or prognosis can be further corroborated, by correlating the expression levels of any one or more of various downstream targets effected by Notch receptor activation. In certain embodiments, the diagnosis or prognosis may be corroborated by measuring expression levels of ICD.

[0101] In one embodiment, Notch1 is detected by (1) adding an antibody of the invention to the sample or tissue section; (2) adding goat anti-mouse IgG antibody conjugated with peroxidase; (3) fixing with diaminobenzidene and peroxide, and (4) examining the sample or section, wherein reddish brown color indicates that the cells bear the antigen. According to the method, the effectiveness of a cancer treatment may be monitored by periodically measuring changes in the level of the antigen in a tissue sample taken from a patient undergoing the therapy, and correlating the change in level of the antigen with the effectiveness of the therapy, wherein a lower level of Notch1 expression determined at a later time point relative to the level of Notch1 determined at an earlier time point during the course of therapy indicates effectiveness of the therapy for the cancer disease. In an alternative embodiment, the levels of ICD in the cytoplasmic domain that is cleaved during the Notch cascade may be determined over time as an indication of the efficacy of the therapeutic protocol. Thus, a decrease in the level of the cytoplasmic domain ICD after treatment is indicative of a positive outlook and vice versa. In certain embodiments, levels of the ICD are measured over a plurality of time points.

[0102] An illustrative embodiment provides a method of diagnosis or prognosis comprising the steps of: examining the expression of ICD in a sample of diseased cells, e.g., breast tumor by immunohistochemistry, wherein a predominantly cytosolic staining indicates a lower likelihood of survival of the individual, wherein a lower cytosolic staining indicates a greater likelihood of survival.

[0103] In yet another embodiment, the application provides methods for determining the appropriate therapeutic protocol for a subject. Specifically, the antibodies of the invention will be very useful for monitoring the course of amelioration of malignancy in an individual, especially in those circumstances where the subject is being treated with a Notch1 antibody that does not compete with the antibodies of the invention for binding Notch1. Essentially, presence or absence or a change in the level of Notch1 expression may be indicative as to whether a subject is likely to have a relapse or a progressive, or a persistent neoplasias such as cancer associated with Notch1. Thus, by measuring an increase in the number of cells expressing Notch1 or changes in the concentration of Notch1 present in various tissues or cells, it is possible to determine whether a particular therapeutic regimen aimed at ameliorating a malignancy associated with Notch1 is effective. For those patients receiving conventional therapy, and whose Notch1 expression has not changed over time, for example, these may, instead be treated with the Notch1 antibodies of the invention and the change in Notch1 observed over time. If a change if readily evident over a period of time, then it may be possible to switch the patient from conventional therapy to therapy with one or more of the antibodies disclosed herein.

[0104] An antibody fragment of the invention is capable of specifically binding to a target molecule of interest. For example, in some embodiments, an antibody fragment specifically binds a tumor antigen. In some embodiments, the antibody fragment specifically binds a cell surface receptor that is activated upon receptor multimerization (e.g., dimerization). In some embodiments, binding of an antibody of the invention to a target molecule inhibits binding of another molecule (such as a ligand, where the target molecule is a receptor) to said target molecule.

[0105] Thus, in one example, an antibody fragment of the invention when bound to a target molecule inhibits binding of a cognate binding partner to the target molecule. A cognate binding partner can be a ligand, or a hetero or homodimerizing molecule. In one embodiment, an antibody fragment of the invention when bound to a target molecule inhibits target molecule receptor activation. For example, in some embodiments wherein an antibody or a fragment thereof is an antagonist, binding of the antibody fragment to a cell surface receptor may inhibit dimerization of the receptor with another unit of the receptor, whereby activation of the receptor is inhibited (due at least in part to a lack of receptor dimerization). In one embodiment, an antibody fragment of the invention is capable of competing with a native Notch receptor binding partner, e.g., delta or Serrate to the Notch1 receptor. In another embodiment, an antibody of the invention or a fragment thereof is capable of competing with an endogenous Notch receptor ligand for binding to a Notch1 receptor.

[0106] In certain embodiments, the herein described antibodies which antagonize, or inhibit, Notch function by either blocking or inhibiting Notch binding to its endogenous ligand or preventing or delaying Notch cascade activation (hereinafter “Antagonist Therapeutics Antibodies”) are administered for therapeutic effect. Disorders which can thus be treated can be identified by in vitro assays such as those described herein or known to one skilled in the art. Such Antagonist Antibodies include anti-Notch neutralizing antibodies, and competitive inhibitors of Notch protein-protein interactions as detailed infra. In furtherance of the above objective, an antibody of the invention is administered to treat a cancerous condition, or to prevent progression from a pre-neoplastic or non-malignant state into a neoplastic or a malignant state.

[0107] In one aspect, the invention provides an antibody or a fragment thereof that is an antagonist in single-armed form, but is an agonist or has agonist activity in a two-armed form (i.e., wherein the two arms have the same antigen binding capability).

[0108] Thus, in certain aspects, the invention provides a method for treating a disease comprising administering to a subject in need of such a treatment an effective amount for treating the disease of at least one antibody or antigenic or binding fragment thereof (“fragment”) disclosed herein that binds to native human Notch1 (hNotch1 or Notch1) and abolishes or attenuates the function of the native hNotch1 or hNotch receptor. A variety of diseases may be treated with the above described methods including cancer, in particular T-cell acute lymphoblastic leukemia/lymphoma, human breast cancer, human colorectal cancer, melanoma, human lung cancer, human head and neck cancers and human prostate cancer, an immune or inflammatory disorder like colitis or asthma, an infectious disease, an angiogenesis disorder, atherosclerosis, or a disorder of the kidney or any other disorder mediated by Notch signaling. Cardiovascular disease associated with Notch1 polymorphism as well as plasma disorders and neovascular disorders mediated by Notch1 receptor or aberrant receptor activation area also included.

[0109] Notch has also been implicated in regulating self-renewal of stem cells. Consequently, blocking notch signally by utilizing one or more of the invention antibodies will induce differentiation and sensitize Notch-bearing tumor cells to treatment with a Notch inhibitor. See, for example, WO 2008/108910, the entire content of which is incorporated by reference herein. See also “Notch signaling regulates stem cell numbers in vitro and in vivo” Nature 442, 823-826 (2006); Chica, S., Stem Cells 24:2437 (2006); Alexson, T. O. et al. (2006) Dev. Neurosci. 28:34 (2006); Shigeru, “Concise Review: Notch Signaling in Stem Cell Systems”. Stem Cells 24:2437-2447 (2006).

[0110] In yet another embodiment, there are provided Agonist Antibodies that promote Notch signaling cascade. A proposed use in accordance with this objective is using such agonist antibodies to treat skin cancer wherein the agonist antibodies described herein will decrease proliferation of skin cancer cells by activating the Notch receptor.

[0111] Yet another objective resides in the proposed use of constitutively active Notch receptor or an agonist thereof, for the purpose of developing a medicament that may find use in the treatment of a condition which is responsive to constitutively active Notch receptor or an agonist hereof.

[0112] In a further embodiment, the present invention provides a method of inhibiting or killing cancer cells, comprising: providing to a patient in need thereof the monoclonal antibody, or binding fragment thereof of the present invention, under conditions and in an amount sufficient for the binding to the cancer cells, thereby causing inhibition or killing of the cancer cells by the immune cells of the patient. Preferably, the method is for the treatment of T-cell acute lymphoblastic leukemia/lymphoma, human colon cancer, melanoma, human lung cancer and human prostate cancer. The monoclonal antibody is preferably conjugated with a cytotoxic moiety, such as a chemotherapeutic agent, a photoactivated toxin, a RNAi molecule or a radioactive agent. Preferably, the cytotoxic moiety may be a Ricin. An alternative method proposes treatment of a Notch1 mediated disorder comprising the steps as outlined above. Representative disorders include an immune or inflammatory disorder like colitis or asthma, an infectious disease, an angiogenesis disorder, atherosclerosis, or a disorder of the kidney or any other disorder mediated by Notch signaling.

[0113] In one embodiment, an oligonucleotide, such as an RNAi molecule inhibiting Notch1 expression may be conjugated to, or form the therapeutic agent portion of an immunoconjugate or antibody fusion protein of the present invention. Alternatively, the oligonucleotide may be administered concurrently or sequentially with a naked or conjugated anti-Notch1 antibody or antibody fragment of the present invention. In one embodiment, the oligonucleotides are an antisense oligonucleotide (RNAi) that preferably is directed against Notch1 expression.

[0114] An alternative embodiment provides a method of treating a Notch mediated disorder by administering a pharmaceutical composition comprising at least one Notch1 inhibitor wherein the inhibitor is an anti-Notch1 antibody conjugated to a Notch1 specific RNA inhibitor, and a pharmaceutically acceptable carrier. RNA inhibition (RNAi) is based on antisense modulation of Notch1 in cells and tissues comprising contacting the cells and tissues with at least one Notch1 antibody conjugated to a nucleic acid molecule that modulated transcription or translation of Notch1 receptor protein, including but not limited to double stranded RNA, (dsRNA), small interfering RNA (siRNA), ribozymes and locked nucleic acids (LNAs), and a pharmaceutically acceptable carrier.

[0115] The present invention further provides a method for localizing cancer cells in a patient, comprising: (a) administering to the patient a detectably-labeled monoclonal antibody of the invention, or binding fragment thereof; (b) allowing the detectably-labeled (e.g. radiolabeled; flurochrome labeled, or enzyme labeled, especially via ELISA) monoclonal antibody, or binding fragment thereof, to bind to the cancer cells within the patient; and (c) determining the location of the labeled monoclonal antibody or binding fragment thereof, within the patient.

[0116] Another embodiment of the invention relates to the use of invention antibodies, and VRs, FRs and CDRs thereof, in directed molecular evolution technologies such as phage display or bacterial or yeast cell surface display technologies in order to generate polypeptides with enhanced affinity, specificity, stability or other desired characteristics.

[0117] Another embodiment of the present invention is a cancer cell targeting diagnostic immunoconjugate comprising an antibody component that comprises an antibody or fragment thereof of any one of the antibodies or fragments thereof of the present invention, wherein the antibody, or fragment thereof is bound to at least one diagnostic/detection agent.

[0118] Preferably, the diagnostic/detection agent is selected from the group comprising a radionuclide, a contrast agent, and a photoactive diagnostic/detection agent. Still preferred, the diagnostic/detection agent is a radionuclide with an energy between 20 and 4,000 keV or is a radionuclide selected from the group consisting of ¹¹⁰In, ¹¹¹In, ¹⁷⁷Lu, ¹¹⁸F, ⁵²Fe, ⁶²Cu, ⁶⁴Cu, ⁶⁷Cu, ⁶⁷Ga, ⁶⁸Ga, ⁸⁶Y, ⁹⁰Y, ⁸⁹Zr, ⁹⁴mTc, ⁹⁹Tc, ⁹⁹mTc, ¹²⁰I, ¹²³I, ¹²⁴I, ¹²⁵I, ¹³¹I, ¹⁵⁴⁻¹⁵⁸Gd, ³²P, ¹¹C, ¹³N, ¹⁵O, ¹⁸⁶Re, ¹⁸⁸Re, ⁵¹Mn, ⁵²mMn, ⁵⁵Co, ⁷²As, ⁷⁵Br, ⁷⁶Br, ⁸²mRb, ⁸³Sr, or other gamma-, beta-, or positron-emitters. Also preferred, the diagnostic/detection agent is a paramagnetic ion, such as the a metal comprising chromium (III), manganese (II), iron (III), iron (II), cobalt (II), nickel (II), copper (II), neodymium (III), samarium (III), ytterbium (III), gadolinium (III), vanadium (II), terbium (III), dysprosium (III), holmium (III) and erbium (III), or a radioopaque material, such as barium, diatrizoate, ethiodized oil, gallium citrate, iocarmic acid, iocetamic acid, iodamide, iodipamide, iodoxamic acid, iogulamide, iohexyl, iopamidol, iopanoic acid, ioprocemic acid, iosefamic acid, ioseric acid, iosulamide meglumine, iosemetic acid, iotasul, iotetric acid, iothalamic acid, iotroxic acid, ioxaglic acid, ioxotrizoic acid, ipodate, meglumine, metrizamide, metrizoate, propyliodone, and thallous chloride.

[0119] Also preferred, the diagnostic/detection agent is a fluorescent labeling compound selected from the group comprising fluorescein isothiocyanate, rhodamine, phycoerytherin, phycocyanin, allophycocyanin, o-phthaldehyde and fluorescamine, a chemiluminescent labeling compound selected from the group comprising luminol, isoluminol, an aromatic acridinium ester, an imidazole, an acridinium salt and an oxalate ester, or a bioluminescent compound selected from the group comprising luciferin, luciferase and aequorin. In another embodiment, the diagnostic immunoconjugates of the present invention are used in intraoperative, endoscopic, or intravascular tumor diagnosis.

[0120] Another embodiment of the present invention is a cancer cell targeting therapeutic immunoconjugate comprising an antibody component that comprises an antibody or fragment thereof of any one of the antibodies, fusion proteins, or fragments thereof of the present invention, wherein the antibody, fusion protein, or fragment thereof is bound to at least one therapeutic agent.

[0121] Preferably, the therapeutic agent is selected from the group consisting of a radionuclide, an immunomodulator, a hormone, a hormone antagonist, an enzyme, oligonucleotide, an enzyme inhibitor, a photoactive therapeutic agent, a cytotoxic agent, an angiogenesis inhibitor, and a combination thereof.

[0122] In one embodiment, the therapeutic agent is a cytotoxic agent, such as a drug or a toxin. Also preferred, the drug is selected from the group consisting of nitrogen mustards, ethylenimine derivatives, alkyl sulfonates, nitrosoureas, gemcitabine, triazenes, folic acid analogs, anthracyclines, taxanes, COX-2 inhibitors, pyrimidine analogs, purine analogs, antibiotics, enzymes, enzyme inhibitors, epipodophyllotoxins, platinum coordination complexes, vinca alkaloids, substituted ureas, methyl hydrazine derivatives, adrenocortical suppressants, hormone antagonists, endostatin, taxols, camptothecins, SN-38, doxorubicins and their analogs, antimetabolites, alkylating agents, antimitotics, antiangiogenic, apoptotoic agents, methotrexate, CPT-11, and a combination thereof.

[0123] In another embodiment, the therapeutic agent is an oligonucleotide. For example, the oligonucleotide may be an antisense oligonucleotide such as an antisense oligonucleotide against Notch 1 or an RNAi molecule against Notch1 receptor expression.

[0124] In another embodiment, the therapeutic agent is a toxin selected from the group consisting of ricin, abrin, alpha toxin, saporin, ribonuclease (RNase), DNase I, Staphylococcal enterotoxin-A, pokeweed antiviral protein, gelonin, diphtherin toxin, Pseudomonas exotoxin, and Pseudomonas endotoxin and combinations thereof, an immunomodulator is selected from the group consisting of a cytokine, a stem cell growth factor, a lymphotoxin, a hematopoietic factor, a colony stimulating factor (CSF), an interferon (IFN), a stem cell growth factor, erythropoietin, thrombopoietin and a combinations thereof, a radionuclide selected from the group consisting of ³²P, ³³P, ⁴⁷Sc, ⁶⁴Cu, ⁶⁷Cu, ⁶⁷Ga, ⁸⁶Y, ⁹⁰Y, ¹¹¹Ag, ¹¹¹In, ¹²⁵U, ¹³¹I, ¹⁴²Pr, ¹⁵³Sm, ¹⁶¹Tb, ¹⁶⁶Dy, ¹⁶⁶Ho, ¹⁷⁷Lu, ¹⁸⁶Re, ¹⁸⁸Re, ¹⁸⁹Re, ²¹²Pb, ²¹²Bi, ²¹³Bi, ²¹¹At, ²²³Ra and ²²⁵Ac, and combinations thereof, or a photoactive therapeutic agent selected from the group comprising chromogens and dyes.

[0125] Still preferred, the therapeutic agent is an enzyme selected from the group comprising malate dehydrogenase, staphylococcal nuclease, delta-V-steroid isomerase, yeast alcohol dehydrogenase, α-glycerophosphate dehydrogenase, triose phosphate isomerase, horseradish peroxidase, alkaline phosphatase, asparaginase, glucose oxidase, β-galactosidase, ribonuclease, urease, catalase, glucose-6-phosphate dehydrogenase, glucoamylase and acetylcholinesterase.

[0126] A further aspect of the invention pertains to kits. The invention is a kit comprising a container housing Notch1 antibody or fragment thereof or antibody containing composition and instructions for administering the components in the kit to a subject at risk of, or in need of, treatment of a disease. The kit may further comprise a container housing a pharmaceutical preparation diluent.

[0127] The kit may also be used for determining whether an embedded biological sample contains human Notch1 protein comprising: (a) an Notch1-binding agent that specifically binds with an embedded human Notch1 protein to form a binding complex; and (b) an indicator capable of signaling the formation of said binding complex, wherein the Notch1 binding agent is a monoclonal antibody or a binding fragment thereof as set forth in the application. Diagnostic procedures using anti-Notch1 antibody of the invention can be performed by diagnostic laboratories, experimental laboratories, practitioners, or private individuals. The clinical sample is optionally pre-treated for enrichment of the target being tested for. The user then applies a reagent contained in the kit in order to detect the changed level or alteration in the diagnostic component

[0128] In a further embodiment, the invention concerns an article of manufacture, comprising: a container; a label on the container; and composition comprising an active agent contained within the container; wherein the composition is effective for the detection, diagnosis or prognosis of neoplasia associated with expression of Notch1 and the label on the container indicates that the composition can be used for the diagnosis or the prognosis of conditions characterized by overexpression of the Notch1 protein receptor.

[0129] The invention further pertains to an article of manufacture comprising a container and a composition contained within said container, wherein the composition includes an antibody as described herein.

[0130] Each of the limitations of the invention can encompass various embodiments of the invention. It is, therefore, anticipated that each of the limitations of the invention involving any one element or combinations of elements can be included in each aspect of the invention. This invention is not limited in its application to the details of construction and the arrangement of components set forth in the following description or illustrated in the drawings. The invention is capable of other embodiments and of being practiced or of being carried out in various ways.

[0131] Other characteristics and advantages of the invention appear in the continuation of the description with the examples and the Figures whose legends are represented below.

### BRIEF DESCRIPTION OF THE DRAWINGS

[0132] The file of this patent contains at least one drawing executed in color. Copies of this patent with color drawing(s) will be provided by the Patent and Trademark Office upon request and payment of the necessary fee.

[0133] FIG. 1 shows a Western blot example of Notch1 expressing stable cell lines. Kinetic expression of stably expressed human full-length Notch1 as functions of time and tetracycline concentration, respectively, was conducted where optimal dose/time effect for the Notch lines was identified.

[0134] FIG. 2 shows an IHC staining example of a Notch1 expressing stable cell line. The human full-length Notch1 expressing stable cell lines were analyzed by IHC.

[0135] FIG. 3 shows a diagram of panning procedures used to identify novel Notch-specific antibodies.

[0136] FIG. 4 Phage displayed ScFv (N153-147) binding on Notch 1 on cells detected in FACS. Dotted line shows binding on 293 TRex control cells and solid trace line shows binding to Notch 1 expressing 293 TRex cells.

[0137] FIG. 5 shows purified Notch IgG by SDS-PAGE analysis following expression and purification in mammalian cells.

[0138] FIG. 6 displays binding affinity determination (EC50) in ELISA using different concentrations of purified IgG protein. (A) Three mAbs binding to Notch 1 ligand binding domain antigen (Ala19-Gln526); (B) Two mAbs binding to Notch 1 LNR-HD domain protein

[0139] FIG. 7 shows Notch 1 mAb blocking Notch1/Fc and Notch1 ligand interaction. IgG is the isotype non-blocker control and four Notch 1 ligand blocking Mabs are shown as indicated.

[0140] FIG. 8 shows the FACS analysis of Notch antibodies binding to (A) 293 FlpIn (TREx) cells stably expressing the different Notch paralogs (i.e., Notch1, Notch-2, Notch-3, and Notch-4) and (B) LS-1034 and BxPC3 cancer cell lines.

[0141] FIG. 9 shows the effect of Notch mAbs on the Jag-2-induced luciferase reporter gene activity in U2O5 FlpIn TREx cells stably expressing (A) hNotch1, (B) hNotch-2, (C) hNotch-3 chimera receptors, and (D) mNotch1 receptor. (E) Potency (IC₅₀) determined from the sigmoid curves generated by serial dilution of the Mabs tested in the Notch1-Gal4 reporter assay. IC₅₀ values were calculated using a 3-parameter logistic curve fit with the top fixed at 100. (F) Summary of the monoclonal antibody activity (IC50s<150 nM) as determined by the Notch1, −2 and -3 Gal4 reporter signaling assays and FACS analysis. Antibodies according to the present invention were able to inhibit Notch1 signaling as indicated by a decrease of luciferase activity in the reporter assay. Data are represented as luciferase fold stimulation in ligand-activated Notch cells relative to Notch cells co-cultivated with parental 3T3 cells (no ligand).

[0142] FIG. 10 displays a strategy adopted to generate the 10 k Membranome phage-Ab collection.

[0143] FIG. 11 shows a scatter plot of hybridization data obtained from incubating the Cy-5 and Cy-3 labelled tag probes on the micro-Array_{—}44 k chip where complementary tag sequences were immobilized. Hybridization was quantified by a fluorescence scanner. Results reported were obtained by combining data from two independent fluor reversal experiments. Orange dots indicate signals with log₂ ratio>2.7 and log₂ (average intensity>10.5. Red big dots indicate the 8 phage-Ab selected dots.

[0144] FIG. 12 shows the effect of Notch mAbs on ligand-independent spontaneous activation of Notch1 receptors bearing Class I (i.e., promote heterodimer dissociation) or Class II (i.e., tandem insertions that duplicate the S2 cleavage) mutations in the negative regulatory region (NRR) of the receptor. Antibodies according to the present invention were able to inhibit Notch1 signaling to the Class I (A), but not to the Class II (B) mutations as indicated by a decrease of luciferase activity in the reporter assay. Data are represented as luciferase fold stimulation observed in cells bearing Notch mutations relative to cells bearing the wild-type form of the receptor.

### DETAILED DESCRIPTION OF THE INVENTION

[0145] Provided herein are various human Notch1 and Notch1/Notch3 specific antibodies, preferably monoclonal antibodies. Included are antagonist, inhibitory and neutralizing anti-Notch1 antibodies that inhibit or decrease cancer cell growth or proliferation. Compositions comprising one or more of the herein described antibodies effective for use in the treating Notch1 mediated hyper-proliferative disorders are also included. A Notch receptor antagonist includes antigen-binding fragments thereof that bind the Notch receptor extracellularly and is effective in blocking cleavage of the receptor or activating the Notch receptor mediated signaling cascade. The compositions can be provided in an article of manufacture or a kit.

[0146] Also provided are agonist anti-notch1 antibodies. A Notch receptor agonist includes any molecule that can produce an activated signaling form of the receptor, including soluble ligands of the receptor, antibodies and fragments thereof that bind the Notch receptor extracellularly and have enzymatic activity in cleaving the receptor to release the activated form.

[0147] Another aspect of the invention is an isolated nucleic acid encoding any one or more of the anti-Notch1 antibodies of the invention, as well as a vector comprising the nucleic acid. The human Notch1 DNA sequence can be found using GenBank Accession Number (NP-060087). Methods of recombinant production of the invention antibodies are also within the scope o the invention. Another aspect of the invention is a method of inhibiting or decreasing the proliferation of cancer cells by administering a Notch1 antibody which results in blocking of the endogenous ligand to the Notch1 receptor or inactivation/deactivation of Notch signaling. Another aspect of the invention is a method of destroying cancer and tumor cells which express a Notch receptor by administering to a patient in need thereof, a therapeutically effective amount of a composition comprising a Notch receptor binding partner, e.g., any one or more of the Notch specific antibodies disclosed herein effective for that purpose. A further aspect of the invention is a method of alleviating cancer by administering an agonist or antagonist of Notch receptor. For therapeutic applications, the modulators of Notch signaling can be used alone, or in combination therapy with, e.g., hormones, antiantiogens, or radiolabeled compounds, or with surgery, cryotherapy, and/or radiotherapy.

[0148] The Notch receptor binding partner useful in destroying cancer cells includes soluble ligands of the receptor, antibodies and fragments thereof that bind the Notch receptor. The binding partners can be conjugated to a cytotoxic agent. The antibodies are preferably growth inhibitory antibodies. The cytotoxic agent can be a toxin, antibiotic, radioactive isotope or nucleolytic enzyme. A preferred cytotoxic agent is a toxin, preferably a small molecule toxin such as calicheamicin or a maytansinoid.

[0149] The agonists/antagonists and binding partners of Notch receptor can be synthetically or recombinantly produced or otherwise isolated.

[0150] The mention of particular references, patent application and patents throughout this application should be read as being incorporated by reference into the text of the specification.

### Definitions

[0151] Before the present proteins, nucleotide sequences, and methods are described, it is to be understood that the present invention is not limited to the particular methodologies, protocols, cell lines, vectors, and reagents described, as these may vary. It is also understood that the terminology used herein is for the purpose of describing particular embodiments only, and is not to limit the scope of the present invention.

[0152] The singular forms “a,” “an,” and “the” include plural reference unless the context clearly dictates otherwise.

[0153] All technical and scientific terms used herein have the same meanings as commonly understood by one of ordinary skill in the art to which this invention pertains. The practice of the present invention will employ, unless otherwise indicated, conventional techniques of protein chemistry and biochemistry, molecular biology, microbiology and recombinant DNA technology, which are within the skill of the art. Such techniques are explained fully in the literature.

[0154] Although any machines, materials, and methods similar or equivalent to those described herein can be used to practice or test the present invention, the preferred machines, materials, and methods are now described. All patents, patent applications, and publications mentioned herein, whether supra or infra, are each incorporated by reference in its entirety.

[0155] Terms used throughout this application are to be construed with ordinary and typical meaning to those of ordinary skill in the art. However, Applicants desire that the following terms be given the particular definition as defined below:

[0156] Also, the phraseology and terminology used herein is for the purpose of description and should not be regarded as limiting. The use of “including,” “comprising,” or “having,” “containing”, “involving”, and variations thereof herein, is meant to encompass the items listed thereafter and equivalents thereof as well as additional items.

[0157] “Nucleic acid” or a “nucleic acid molecule” as used herein refers to any DNA or RNA molecule, either single- or double-stranded and, if single-stranded, the molecule of its complementary sequence in either linear or circular form. In discussing nucleic acid molecules, a sequence or structure of a particular nucleic acid molecule may be described herein according to the normal convention of providing the sequence in the 5′ to 3′ direction. In some embodiments of the invention, nucleic acids are “isolated.” This term, when applied to DNA, refers to a DNA molecule that is separated from sequences with which it is immediately contiguous in the naturally occurring genome of the organism in which it originated. For example, an “isolated nucleic acid” may comprise a DNA molecule inserted into a vector, such as a plasmid or virus vector, or integrated into the genomic DNA of a prokaryotic or eukaryotic cell or host organism. When applied to RNA, the term “isolated nucleic acid” refers primarily to an RNA molecule encoded by an isolated DNA molecule as defined above. Alternatively, the term may refer to an RNA molecule that has been sufficiently separated from other nucleic acids with which it would be associated in its natural state (i.e., in cells or tissues). An isolated nucleic acid (either DNA or RNA) may further represent a molecule produced directly by biological or synthetic means and separated from other components present during its production.

[0158] Similarly, “amino acid sequence” as used herein refers to an oligopeptide, peptide, polypeptide, or protein sequence and fragments or portions thereof, of a naturally occurring or synthetic molecule.

[0159] The terms “isolated”, “purified”, or “biologically pure” refer to material that is substantially or essentially free from components that normally accompany it as found in its native state. Purity and homogeneity are typically determined using analytical chemistry techniques such as polyacrylamide gel electrophoresis or high performance liquid chromatography. A protein or nucleic acid that is the predominant species present in a preparation is substantially purified. In particular, an isolated nucleic acid is separated from some open reading frames that naturally flank the gene and encode proteins other than protein encoded by the gene. The term “purified” in some embodiments denotes that a nucleic acid or protein gives rise to essentially one band in an electrophoretic gel. Preferably, it means that the nucleic acid or protein is at least 85% pure, more preferably at least 95% pure, and most preferably at least 99% pure. “Purify” or “purification” in other embodiments means removing at least one contaminant from the composition to be purified. In this sense, purification does not require that the purified compound be homogenous, e.g., 100% pure

[0160] Nucleic acid is “operably linked” when it is placed into a functional relationship with another nucleic acid sequence. This can be a gene and a regulatory sequence(s) which are connected in such a way as to permit gene expression when the appropriate molecules (e.g., transcriptional activator proteins) are bound to the regulatory sequences(s). For example, DNA for a presequence or secretory leader is operably linked to DNA for a polypeptide if it is expressed as a preprotein that participates in the secretion of the polypeptide; a promoter or enhancer is operably linked to a coding sequence if it affects the transcription of the sequence; or a ribosome binding site is operably linked to a coding sequence if it affects the transcription of the sequence; or a ribosome binding site is operably linked to a coding sequence if it is positioned so as to facilitate translation. Generally, “operably linked” means that the DNA sequences being linked are contiguous, and, in the case of a secretory leader, contiguous and in reading phase. However, enhancers do not have to be contiguous Linking is accomplished by ligation at convenient restriction sites. If such sites do not exist; the synthetic oligonucleolide adaptors or linkers are used in accordance with conventional practice.

[0161] The term “cell”, “cell line” and “cell culture” are used interchangeably, and all such designations include progeny. It is also understood that all progeny may not be precisely identical in DNA content, due to deliberate or inadvertent mutations. Mutant progeny that have the same function or biological property, as screened for in the originally transformed cell, are included.

[0162] The “host cells” used in the present invention generally are prokaryotic or eukaryotic hosts. Examples of suitable host cells are described in Section B. Vectors, Host Cells and Recombinant Methods: (vii) Selection and transformation of host cells.

[0163] “Transformation” means introducing DNA into an organism so that the DNA is replicable, either as an extrachronosomal element or by chromosomal integration.

[0164] “Transfection” refers to the taking up of an expression vector by a host cell whether or not any coding sequences are in fact expressed.

[0165] The terms “transfected host cell” and “transformed” refer to the introduction of DNA into a cell. The cell is termed “host cell” and it may be either prokaryotic or eukaryotic. Typical prokaryotic host cells include various strains of E. coli. Typical eukaryotic host cells are mammalian, such as Chinese hamster ovary or cells of human origin. The introduced DNA sequence may be from the same species as the host cell or a different species from the host cell, or it may be a hybrid DNA sequence, containing some foreign and some homologous DNA.

[0166] The terms “replicable expression vector” and “expression vector” refer to a piece of DNA, usually double-stranded, which may have inserted into it a piece of foreign DNA. Foreign DNA is defined as heterologous DNA, which is DNA not naturally found in the host cell. The vector is used to transport the foreign or heterologous DNA into a suitable host cell. Once in the host cell, the vector can replicate independently of the host chromosomal DNA and several copies of the vector and its inserted (foreign) DNA may be generated.

[0167] The term “vector” means a DNA construct containing a DNA sequence which is operably linked to a suitable control sequence capable of effecting the expression of the DNA in a suitable host. Such control sequences include a promoter to effect transcription, an optional operator sequence to control such transcription, a sequence encoding suitable mRNA ribosome binding sites, and sequences which control the termination of transcription and translation. The vector may be a plasmid, a phage particle, or simply a potential genomic insert. Once transformed into a suitable host, the vector may replicate and function independently of the host genome, or may in some instances, integrate into the genome itself. In the present specification, “plasmid” and “vector” are sometimes used interchangeably, as the plasmid is the most commonly used form of vector at present. However, the invention is intended to include such other form of vector which serve equivalent function as and which are, or become, known in the art. Typical expression vectors for mammalian cell culture expression, for example, are based on pRK5 (EP 307,247), pSV16B (WO 91/08291), and pVL1392 (Pharmingen).

[0168] The expression “control sequences” refers to DNA sequences necessary for the expression of an operably linked coding sequence in a particular host organism. The control sequences that are suitable for prokaryotes, for example, include a promoter, optionally an operator sequence, and a ribosome binding site. Eukaryotic cells are known to utilize promoters, polyadenylation signals, and enhancers.

[0169] The terms “protein” or “polypeptide” are intended to be used interchangeably. They refer to a chain of two (2) or more amino acids which are linked together with peptide or amide bonds, regardless of post-translational modification (eg., glycosylation or phosphorylation). Antibodies are specifically intended to be within the scope of this definition. The polypeptides of this invention may comprise more than one subunit, where each subunit is encoded by a separate DNA sequence.

[0170] Amino acids may be referred to herein either by their commonly known three letter symbols or by the one-letter symbols recommended by the IUPAC-IUB Biochemical Nomenclature Commission. Nucleotides, likewise, may be referred to by their commonly accepted single-letter codes.

[0171] The phrase “substantially identical” with respect to an antibody polypeptide sequence shall be construed as an antibody exhibiting at least 70%, preferably 80%, more preferably 90% and most preferably 95% sequence identity to the reference polypeptide sequence. The term with respect to a nucleic acid sequence shall be construed as a sequence of nucleotides exhibiting at least about 85%, preferably 90%, more preferably 95% and most preferably 97% sequence identity to the reference nucleic acid sequence. For polypeptides, the length of the comparison sequences will generally be at least 25 amino acids. For nucleic acids, the length will generally be at least 75 nucleotides. Methods and computer programs for the alignment are well known in the art. Sequence identity may be measured using sequence analysis software (e.g, Sequence Analysis Software Package, Genetics Computer Group, University of Wisconsin Biotechnology Center, 1710 University Ave., Madison, Wis. 53705). This software matches similar sequences by assigning degrees of homology to various substitutions, deletions, and other modifications.

[0172] The term “identity” or “homology” shall be construed to mean the percentage of amino acid residues in the candidate sequence that are identical with the residue of a corresponding sequence to which it is compared, after aligning the sequences and introducing gaps, if necessary to achieve the maximum percent identity for the entire sequence, and not considering any conservative substitutions as part of the sequence identity. A molecule is “substantially similar” to another molecule if both molecules have substantially similar structures or biological activity. Thus, provided that two molecules possess a similar activity, they are considered variants as that term is used herein even if the structure of one of the molecules is not found in the other, or if the sequence of amino acid residues is not identical. Neither N- or C-terminal extensions nor insertions shall be construed as reducing identity or homology

[0173] The terms “identical” or percent “identity,” in the context of two or more nucleic acids or polypeptide sequences, refer to two or more sequences or subsequences that are the same or have a specified percentage of amino acid residues or nucleotides that are the same (i.e., about 60% identity, preferably 70%, 75%, 80%, 85%, 90%, 91%, 92%, 93%, 94%, 95%, 96%, 97%, 98%, 99%, or higher identity over a specified region, when compared and aligned for maximum correspondence over a comparison window or designated region) as measured using a BLAST or BLAST 2.0 sequence comparison algorithms with default parameters described below, or by manual alignment and visual inspection (see, e.g., NCBI web site located at www.ncbi.nlm.nih.gov/BLAST/ or the like). Such sequences are then said to be “substantially identical.” This definition also refers to, or may be applied to, the compliment of a test sequence. The definition also includes sequences that have deletions and/or additions, as well as those that have substitutions, as well as naturally occurring, e.g., polymorphic or allelic variants, and man-made variants. As described below, the preferred algorithms can account for gaps and the like. Preferably, identity exists over a region that is at least about 25 amino acids or nucleotides in length, or more preferably over a region that is 50-100 amino acids or nucleotides in length.

[0174] For sequence comparison, typically one sequence acts as a reference sequence, to which test sequences are compared. When using a sequence comparison algorithm, test and reference sequences are entered into a computer, subsequence coordinates are designated, if necessary, and sequence algorithm program parameters are designated. Preferably, default program parameters can be used, or alternative parameters can be designated. The sequence comparison algorithm then calculates the percent sequence identities for the test sequences relative to the reference sequence, based on the program parameters.

[0175] A “comparison window”, as used herein, includes reference to a segment of one of the number of contiguous positions selected from the group consisting typically of from 20 to 600, usually about 50 to about 200, more usually about 100 to about 150 in which a sequence may be compared to a reference sequence of the same number of contiguous positions after the two sequences are optimally aligned. Methods of alignment of sequences for comparison are well-known in the art. Preferred examples of algorithms that are suitable for determining percent sequence identity and sequence similarity include the BLAST and BLAST 2.0 algorithms. BLAST and BLAST 2.0 are used, with the parameters described herein, to determine percent sequence identity for the nucleic acids and proteins of the invention.

[0176] An indication that two nucleic acid sequences or polypeptides are substantially identical is that the polypeptide encoded by the first nucleic acid is immunologically cross reactive with the antibodies raised against the polypeptide encoded by the second nucleic acid, as described below. Thus, a polypeptide is typically substantially identical to a second polypeptide, e.g., where the two peptides differ only by conservative substitutions. Another indication that two nucleic acid sequences are substantially identical is that the two molecules or their complements hybridize to each other under stringent conditions, as described below. Yet another indication that two nucleic acid sequences are substantially identical is that the same primers can be used to amplify the sequences.

[0177] “Conservatively modified variants” applies to both amino acid and nucleic acid sequences. With respect to particular nucleic acid sequences, conservatively modified variants refers to those nucleic acids which encode identical or essentially identical amino acid sequences, or where the nucleic acid does not encode an amino acid sequence, to essentially identical or associated, e.g., naturally contiguous, sequences. Because of the degeneracy of the genetic code, a large number of functionally identical nucleic acids encode most proteins. For instance, the codons GCA, GCC, GCG, and GCU all encode the amino acid alanine. Thus, at every position where an alanine is specified by a codon, the codon can be altered to another of the corresponding codons described without altering the encoded polypeptide. Such nucleic acid variations are “silent variations,” which are one species of conservatively modified variations. Every nucleic acid sequence herein which encodes a polypeptide also describes silent variations of the nucleic acid. One of skill will recognize that in certain contexts each codon in a nucleic acid (except AUG, which is ordinarily the only codon for methionine, and TGG, which is ordinarily the only codon for tryptophan) can be modified to yield a functionally identical molecule. Accordingly, often silent variations of a nucleic acid which encodes a polypeptide is implicit in a described sequence with respect to the expression product, but not with respect to actual probe sequences.

[0178] As to amino acid sequences, one of skill will recognize that individual substitutions, deletions or additions to a nucleic acid, peptide, polypeptide, or protein sequence which alters, adds or deletes a single amino acid or a small percentage of amino acids in the encoded sequence is a “conservatively modified variant” where the alteration results in the substitution of an amino acid with a chemically similar amino acid. Conservative substitution tables providing functionally similar amino acids are well known in the art. Such conservatively modified variants are in addition to and do not exclude polymorphic variants, interspecies homologs, and alleles of the invention. Typically conservative substitutions for one another: 1) Alanine (A), Glycine (G); 2) Aspartic acid (D), Glutamic acid (E); 3) Asparagine (N), Glutamine (Q); 4) Arginine (R), Lysine (K); 5) Isoleucine (I), Leucine (L), Methionine (M), Valine (V); 6) Phenylalanine (F), Tyrosine (Y), Tryptophan (W); 7) Serine (S), Threonine (T); and 8) Cysteine (C), Methionine (M) (see, e.g., Creighton, Proteins (1984)).

[0179] The term “amino acid sequence variant” refers to a polypeptide that has amino acid sequences that differ to some extent from a native sequence polypeptide.

[0180] “Substitutional” “amino acid variant” refers to molecules with some differences in their amino acid sequences as compared to a native amino acid sequence. The substitutions may be single, where only one amino acid in the molecule as been substituted, or they may be multiple, where two or more amino acids have been substituted in the same molecule. Ordinarily, amino acid sequence variants of Notch receptor will possess at least about 70% homology with the native sequence Notch receptor, preferably, at least about 80%, more preferably at least about 85%, even more preferably at least about 90% homology, and most preferably at least 95%. The amino acid sequence variants can possess substitutions, deletions, and/or insertions at certain positions within the amino acid sequence of the native amino acid sequence. “Insertional” variants are those with one or more amino acids inserted immediately adjacent to an amino acid at a particular position in a native sequence. Immediately adjacent to an amino acid means connected to either the α-carboxyl or α-amino functional group of the amino acid. “Deletional” variants are those with one or more amino acids in the native amino acid sequence removed. Ordinarily, deletional variants will have one or two amino acids deleted in a particular region of the molecule.

[0181] The term “antibody” (Ab) as used herein includes monoclonal antibodies, polyclonal antibodies, multispecific antibodies (e.g. bispecific antibodies), and antibody fragments, so long as they exhibit the desired biological activity. The term “immunoglobulin” (Ig) is used interchangeably with “antibody” herein. An “isolated antibody” is one which has been identified and separated and/or recovered from a component of its natural environment. Contaminant components of its natural environment are materials which would interfere with diagnostic or therapeutic uses for the antibody, and may include enzymes, hormones, and other proteinaceous or nonproteinaceous solutes. In certain embodiments, the antibody will be purified (1) to greater than 95% by weight of antibody as determined by the Lowry method, and most preferably more than 99% by weight, (2) to a degree sufficient to obtain at least 15 residues of N-terminal or internal amino acid sequence by use of a spinning cup sequenator, or (3) to homogeneity by SDS-PAGE under reducing or non-reducing conditions using Coomassie blue or, preferably, silver stain. Isolated antibody includes the antibody in situ within recombinant cells since at least one component of the antibody's natural environment will not be present. Ordinarily, however, isolated antibody will be prepared by at least one purification step.

[0182] The term “immunoglobulin” or “antibody” (used interchangeably herein) is used in the broadest sense and is meant to encompass an immunoglobulin molecule obtained by in vitro or in vivo generation of an immunogenic response. A broad scope refers to an antigen-binding protein having a basic four-polypeptide chain structure consisting of two heavy and two light chains, said chains being stabilized, for example, by interchain disulfide bonds, which has the ability to specifically bind antigen. Both heavy and light chains are folded into domains. The term “domain” refers to a globular region of a heavy or light chain polypeptide comprising peptide loops (e.g., comprising 3 to 4 peptide loops) stabilized, for example, by β-pleated sheet and/or intrachain disulfide bond. Domains are further referred to herein as “constant” or “variable”, based on the relative lack of sequence variation within the domains of various class members in the case of a “constant” domain, or the significant variation within the domains of various class members in the case of a “variable” domain. “Constant” domains on the light chain are referred to interchangeably as “light chain constant regions”, “light chain constant domains”, “CL” regions or “CL” domains) “Constant” domains on the heavy chain are referred to interchangeably as “heavy chain constant regions”, “heavy chain constant domains”, “CH” regions or “CH” domains) “Variable” domains on the light chain are referred to interchangeably as “light chain variable regions”, “light chain variable domains”, “VL” regions or “VL” domains). “Variable” domains on the heavy chain are referred to interchangeably as “heavy chain variable regions”, “heavy chain variable domains”, “VH” regions or “VH” domains). Particular amino acid residues are believed to form an interface between the light and heavy chain variable domains (Clothia et al., J. Mol Biol. 186, 651-66, 1985); Novotny and Haber, Proc. Natl. Acad Sci. USA 82, 4592-4596 (1985). The term includes polyclonal, monoclonal, single chain and multivalent antibodies. Fragments e.g., Fab, Fab′, F(ab)2, Fv etc. are also included. Representative members include for example, single anti-Notch1 monoclonal antibodies (including agonist, antagonist, and neutralizing antibodies), anti-Notch1 antibody compositions with polyepitopic specificity (e.g. bispecific antibodies so long as they exhibit the desired biological activity), polyclonal antibodies, single chain anti-Notch1 antibodies, and fragments of anti-Notch1 antibodies as long as they exhibit the desired biological or immunological activity. The antibodies may be genetically engineered antibodies and/or produced by recombinant DNA techniques. Fully human antibodies can also be produced by phage display, gene and chromosome transfection methods, as well as by other means. The L chain from any vertebrate species can be assigned to one of two clearly distinct types, called kappa and lambda, based on the amino acid sequences of their constant domains. Depending on the amino acid sequence of the constant domain of their heavy chains (C_{H}), immunoglobulins can be assigned to different classes or isotypes. There are five classes of immunoglobulins: IgA, IgD, IgE, IgG, and IgM, having heavy chains designated α, δ, ε, γ, and μ, respectively. The γ and α classes are further divided into subclasses on the basis of relatively minor differences in C_{H} sequence and function, e.g., humans express the following subclasses: IgG1, IgG2, IgG3, IgG4, IgA1, and IgA2.

[0183] The term “monoclonal antibody” as used herein refers to an antibody obtained from a population of substantially homogeneous antibodies, i.e., the individual antibodies comprising the population are identical except for possible naturally occurring mutations that may be present in minor amounts. Monoclonal antibodies are highly specific, being directed against a single antigenic site. Furthermore, in contrast to conventional (polyclonal) antibody preparations which typically include different antibodies directed against different determinants (epitopes), each monoclonal antibody is directed against a single determinant on the antigen. In addition to their specificity, the monoclonal antibodies are advantageous in that they are synthesized by the hybridoma culture, uncontaminated by other immunoglobulins. The modifier “monoclonal” indicates the character of the antibody as being obtained from a substantially homogeneous population of antibodies, and is not to be construed as requiring production of the antibody by any particular method. For example, the monoclonal antibodies to be used in accordance with the present invention may be made by the hybridoma method first described by Kohler and Milstein, Nature 256, 495 (1975), or may be made by recombinant methods, e.g., as described in U.S. Pat. No. 4,816,567. The monoclonal antibodies for use with the present invention may also be isolated from phage antibody libraries using the techniques described in Clackson et al. Nature 352: 624-628 (1991), as well as in Marks et al., J. Mol. Biol 222: 581-597 (1991).

[0184] An “intact” antibody is one which comprises an antigen-binding site as well as a C_{L} and at least heavy chain constant domains, C_{H}1, C_{H}2 and C_{H}3. The constant domains may be native sequence constant domains (e.g. human native sequence constant domains) or amino acid sequence variant thereof. Preferably, the intact antibody has one or more effector functions.

[0185] The term “region” refers to a part or portion of an antibody chain and includes constant or variable domains as defined herein, as well as more discrete parts or portions of said domains. For example, light chain variable domains or regions include “complementarity determining regions” or “CDRs” interspersed among “framework regions” or “FRs”, as defined herein.

[0186] The term “antigen” as used herein, means a molecule which is reactive with a specific antibody.

[0187] “Epitope” or “antigenic determinant” refers to a site on an antigen to which an antibody binds. Epitopes can be formed both from contiguous amino acids or noncontiguous amino acids juxtaposed by tertiary folding of a protein. Epitopes formed from contiguous amino acids are typically retained on exposure to denaturing solvents whereas epitopes formed by tertiary folding are typically lost on treatment with denaturing solvents. An epitope typically includes at least 3, and more usually, at least 5 or 8-10 amino acids in a unique spatial conformation. Methods of determining spatial conformation of epitopes include, for example, x-ray crystallography and 2-dimensional nuclear magnetic resonance.

[0188] Antibodies of “IgG class” refers to antibodies of IgG1, IgG2, IgG3, and IgG4. The numbering of the amino acid residues in the heavy and light chains is that of the EU index (Kabat, et al., “Sequences of Proteins of Immunological Interest”, 5^{th} ed., National Institutes of Health, Bethesda, Md. (1991); the EU numbering scheme is used herein).

[0189] An “immunogenic response” or “antigenic response” is one that results in the production of antibodies directed to a compound after the appropriate cells have been contacted therewith. The compound that is used to elicit an immunogenic response is referred to as an immunogen or antigen. The antibodies produced in the immunogenic response specifically bind the immunogen used to elicit the response.

[0190] The term “antibody mutant” refers to an amino acid sequence variant of an antibody wherein one or more of the amino acid residues have been modified. Such mutant necessarily have less than 100% sequence identity or similarity with the amino acid sequence having at least 75% amino acid sequence identity or similarity with the amino acid sequence of either the heavy or light chain variable domain of the antibody, more preferably at least 80%, more preferably at least 85%, more preferably at least 90%, and most preferably at least 95%. Since the method of the invention applies equally to both polypeptides, antibodies and fragments thereof, these terms are sometimes employed interchangeably.

[0191] Alternatively or additionally, the word “mutant”, as used herein, is interchangeable with “mutationally-altered” and “glycosylation site altered”. The terms refer to an antibody that comprises at least one immunoglobulin variable region containing at least one mutation that modifies a V region glycosylation site. A mutant immunoglobulin refers to an immunoglobulin (e.g., F(ab′)₂, Fv, Fab, bifunctional antibodies, antibodies, etc.) comprising at least one immunoglobulin variable region containing at least one mutation that modifies a V region glycosylation site. A mutant immunoglobulin chain has at least one mutation that modifies a V region glycosylation site, typically in the V region framework. Thus, the pattern (i.e., frequency and or location(s) of occurrence) of V region glycosylation sites is altered in a mutant immunoglobulin.

[0192] The term “variable” in the context of variable domain of antibodies, refers to the fact that certain portions of the variable domains differ extensively in sequence among antibodies and are used in the binding and specificity of each particular antibody for its particular antigen. The V domain mediates antigen binding and define specificity of a particular antibody for its particular antigen. However, the variability is not evenly distributed across the 110-amino acid span of the variable domains. It is concentrated in three segments called complementarity determining regions (CDRS) also known as hypervariable regions both in the light chain and the heavy chain variable domains. There are at least two techniques for determining CDRs: (1) an approach based on cross-species sequence variability (i.e., Kabat et al., Sequences of Proteins of Immunological Interest (National Institute of Health, Bethesda, Md. 1987); and (2) an approach based on crystallographic studies of antigen-antibody complexes (Chothia, C. el at. (1989), Nature 342: 877). The more highly conserved portions of variable domains are called the framework (FR) of 15-30 amino acids separated by shorter “hypervariable regions” (9-12 amino acids long). The variable domains of native heavy and light chains each comprise four FR regions, largely adopting a β-sheet configuration, connected by three CDRs, which form loops connecting, and in some cases forming part of, the β-sheet structure. The CDRs in each chain are held together in close proximity by the FR regions and, with the CDRs from the other chain, contribute to the formation of the antigen binding site of antibodies. See Kabat et al., Sequences of Proteins of Immunological Interest, 5th Ed. Public Health Service, National Institutes of Health, Bethesda, Md. (1991). The constant domains are not involved directly in binding an antibody to an antigen, but exhibit various effector function, such as participation of the antibody in antibody-dependent cellular toxicity.

[0193] The term “hypervariable region” when used herein refers to the amino acid residues of an antibody which are responsible for antigen-binding. The hypervariable region generally comprises amino acid residues from a “complementarity determining region” or “CDR” (e.g. around about residues 24-34 (Li), 50-56 (L2) and 89-97 (L3) in the V_{L}, and around about 1-35 (H1), 50-65 (H2) and 95-102 (H3) in the V_{H}; Kabate et al., Sequences of Proteins of Immunological Interest, 5th Ed. Public Health Service, National Institutes of Health, Bethesda, Md. (1991)) and/or those residues from a “hypervariable loop” (e.g. residues 26-32 (L1), 50-52 (L2) and 91-96 (L3) in the V_{L}, and 26-32 (H1), 53-55 (H2) and 96-101 (H3) in the V_{H}; Chothia and Lesk J. Mol. Biol. 196:901-917 (1987)).

[0194] Immunoglobulins or antibodies can exist in monomeric or polymeric form. The term “antigen-binding fragment” refers to a polypeptide fragment of an immunoglobulin or antibody binds antigen or competes with intact antibody (i.e., with the intact antibody from which they were derived) for antigen binding (i.e., specific binding). The term “conformation” refers to the tertiary structure of a protein or polypeptide (e.g., an antibody, antibody chain, domain or region thereof). For example, the phrase “light (or heavy) chain conformation” refers to the tertiary structure of a light (or heavy) chain variable region, and the phrase “antibody conformation” or “antibody fragment conformation” refers to the tertiary structure of an antibody or fragment thereof. Preferably, the fragment exhibits qualitative biological activity in common with a full-length antibody. For example, a functional fragment or analog of an anti-IgE antibody is one which can bind to an IgE immunoglobulin in such a manner so as to prevent or substantially reduce the ability of such molecule from having the ability to bind to the high affinity receptor, FcεRI. Antibody fragments can be prepared by in vitro manipulation of antibodies (e.g., by limited proteolysis of an antibody), or via recombinant DNA technology (e.g., the preparation of single-chain antibodies from phage display libraries). Examples of antibody fragments include Fab, Fab′, F(ab′)2, and Fv fragments; diabodies; linear antibodies (U.S. Pat. No. 5,641,870, Example 2; Zapata et al., Protein Eng. 8(10): 1057-1062 (1995)); single-chain antibody molecules; and multispecific antibodies formed from antibody fragments.

[0195] Binding fragments are produced by recombinant DNA techniques, or by enzymatic or chemical cleavage of intact immunoglobulins. Binding fragments include Fab, Fab′, F(ab′)2, Fabc, Fv, single chains, and single-chain antibodies. Other than “bispecific” or “bifunctional” immunoglobulins or antibodies, an immunoglobulin or antibody is understood to have each of its binding sites identical.

[0196] “A functional variant” of the antibody molecule according to the invention is an antibody molecule which possesses a biological activity (either functional or structural) that is substantially similar to the antibody molecule according to the invention, i.e. a substantially similar substrate specificity or cleavage of the substrate. The term “functional variant” also includes “a fragment”, “an allelic variant”, “variant based on the degenerative nucleic acid code” or “chemical derivatives”. Such a “functional variant” e.g. may carry one or several point mutations, one or several nucleic acid exchanges, deletions or insertions or one or several amino acid exchanges, deletions or insertions. Said functional variant is still retaining its biological activity such as antibody binding activity, at least in part or even going along with an improvement said biological activity.

[0197] An “allelic variant” is a variant due to the allelic variation, e.g. differences in the two alleles in humans. Said variant is still retaining its biological activity such as antibody target binding activity, at least in part or even going along with an improvement said biological activity.

[0198] A “variant based on the degenerative of the genetic code” is a variant due to the fact that a certain amino acid may be encoded by several different nucleotide triplets. Said variant is still retaining its biological activity such as antibody binding activity, at least in part or even going along with an improvement said biological activity.

[0199] A “fusion molecule” may be the antibody molecule according to the invention fused to e.g. a reporter such as a radiolabel, a chemical molecule such as a toxin or a fluorescent label or any other molecule known in the art.

[0200] As used herein, a “chemical derivative” according to the invention is an antibody molecule according to the invention chemically modified or containing additional chemical moieties not normally being part of the molecule. Such moieties may improve the molecule's activity such as target destruction (e.g. killing of tumor cells) or may improve its solubility, absorption, biological half life, etc.

[0201] Papain digestion of antibodies produces two identical antigen-binding fragments, called “Fab” fragments, and a residual “Fc” fragment, a designation reflecting the ability to crystallize readily. The Fab fragment consists of an entire L chain along with the variable region domain of the H chain (VH), and the first constant domain of one heavy chain (CH1). Each Fab fragment is monovalent with respect to antigen binding, i.e., it has a single antigen-binding site. Pepsin treatment of an antibody yields a single large F(ab′)2 fragment which roughly corresponds to two disulfide linked Fab fragments having divalent antigen-binding activity and is still capable of cross-linking antigen. Fab′ fragments differ from Fab fragments by having additional few residues at the carboxy terminus of the CH1 domain including one or more cysteines from the antibody hinge region. Fab′-SH is the designation herein for Fab′ in which the cysteine residue(s) of the constant domains bear a free thiol group. F(ab′)2 antibody fragments originally were produced as pairs of Fab′ fragments which have hinge cysteines between them. Other chemical couplings of antibody fragments are also known.

[0202] The Fc fragment comprises the carboxy-terminal portions of both H chains held together by disulfides. The effector functions of antibodies are determined by sequences in the Fc region, which region is also the part recognized by Fc receptors (FcR) found on certain types of cells. By “Fc” or “Fc region” as used herein is meant the polypeptides comprising the last two constant region immunoglobulin domains of IgA, IgD, and IgG, and the last three constant region immunoglobulin domains of IgE and IgM, and part of the flexible hinge N-terminal to these domains. Although the boundaries of the Fc region may vary, the human IgG heavy chain Fc region is usually defined to comprise residues C226 or P230 to its carboxyl-terminus, wherein the numbering is according to the EU numbering scheme. Fc may refer to this region in isolation, or this region in the context of a full length antibody or antibody fragment. Ergo, by “outside the Fc region” as used herein is meant the region of an antibody that does not comprise the Fc region of the antibody. In accordance with the aforementioned definition of Fc region, “outside the Fc region” for an IgG1 antibody is herein defined to be from the N-terminus up to and including residue T225 or C229, wherein the numbering is according to the EU numbering scheme. Thus the Fab region and part of the hinge region of an antibody are outside the Fc region.

[0203] “Fc receptor” or “FcR” describes a receptor that binds to the Fc region of an antibody. The preferred FcR is a native sequence human FcR. Moreover, a preferred FcR is one which binds an IgG antibody (a gamma receptor) and includes receptors of the FcγRI, FcγRII and FcγRIII subclasses, including allelic variants and alternatively spliced forms of these receptors. FcγRII receptors include FcγRIIA (an “activating receptor”) and FcγRIIB (an “inhibiting receptor”), which have similar amino acid sequences that differ primarily in the cytoplasmic domains thereof. Activating receptor FcγRIIA contains an immunoreceptor tyrosine-based activation motif (ITAM) in its cytoplasmic domain Inhibiting receptor FcγRIIB contains an immunoreceptor tyrosine-based inhibition motif (ITIM) in its cytoplasmic domain. (see review M. in Daeron, Annu Rev. Immunol. 15:203-234 (1997)). FcRs are reviewed in Ravetch and Kinet, Annu Rev. Immunol. 9:457-492 (1991); Capel et al., Immunomethods 4:25-34 (1994); and de Haas et al., J. Lab. Clin. Med. 126:330-41 (1995). Other FcRs, including those to be identified in the future, are encompassed by the term “FcR” herein. The term also includes the neonatal receptor, FcRn, which is responsible for the transfer of maternal IgGs to the fetus (Guyer et al., J. Immunol. 117:587 (1976) and Kim et al., J. Immunol. 24:249 (1994)).

[0204] An “Fv” fragment is the minimum antibody fragment which comprises the variable domains of its heavy chain and light chain and thus contains a complete antigen recognition and binding site. This region consists of a dimer of one heavy and one light chain variable domain in a tight, non-covalent association (VH-VL dimer). It is in this configuration that the three CDRs of each variable domain interact to define an antigen binding site on the surface of the VH-VL dimer. Collectively, the six CDRs confer antigen binding specificity to the antibody. However, even a single variable domain (or half of an Fv comprising only three CDRs specific for an antigen) has the ability to recognize and bind antigen, although at a lower affinity than the entire binding site. One or more scFv fragments may be linked to other antibody fragments (such as the constant domain of a heavy chain or a light chain) to form antibody constructs having one or more antigen recognition sites.

[0205] The term “single chain variable fragment or scFv” refers to an Fv fragment in which the heavy chain domain and the light chain domain are linked. “Single-chain Fv” also abbreviated as “sFv” or “scFv” are antibody fragments that comprise the VH and VL antibody domains connected into a single polypeptide chain. Generally, the sFv polypeptide further comprises a polypeptide linker between the VH and VL domains which enables the sFv to form the desired structure for antigen binding. For a review of sFv, see Pluckthun in The Pharmacology of Monoclonal Antibodies, vol. 113, Rosenburg and Moore eds., Springer-Verlag, New York, pp. 269-315 (1994); Borrebaeck 1995, infra.

[0206] The skilled person will also be familiar with so-called miniantibodies which have a bi-, tri- or tetravalent structure and are derived from scFv. The multimerisation is carried out by di-, tri- or tetrameric coiled coil structures (Pack et al., 1993 Biotechnology II:, 1271-1277; Lovejoy et al. 1993 Science 259: 1288-1293; Pack et al., 1995 J. Mol. Biol. 246: 28-34).

[0207] By minibody the skilled person means a bivalent, homodimeric scFv derivative. It consists of a fusion protein which contains the CH3 region of an immunoglobulin, preferably IgG, most preferably IgG1 as the dimerisation region which is connected to the scFv via a hinge region (e.g. also from IgG1) and a linker region. The disulphide bridges in the hinge region are mostly formed in higher cells and not in prokaryotes. In some embodiments an antibody according to the invention is a Notch1-specific minibody antibody fragment. Examples of minibody-antibody proteins from the prior art can be found in Hu et al. (1996, Cancer Res. 56: 3055-61).

[0208] The term “diabodies” refers to a small antibody fragments with two antigen-binding sites, which fragments comprise a heavy chain variable domain (VH) connected to a light chain variable domain (VL) in the same polypeptide chain (VH-VL). By using a linker that is too short to allow pairing between the two domains on the same chain, the domains are forced to pair with the complementary domains of another chain and create two antigen-binding sites. Diabodies are described more fully in, for example, EP 404,097; WO 93/11161; and Hollinger et al., Proc. Natl. Acad Sci. USA 90: 6444-6448 (1993). For the structure and properties of the different classes of antibodies, see, e.g., Basic and Clinical Immunology, 8th edition, Daniel P. Stites, Abba I. Terr and Tristram G. Parslow (eds.), Appleton & Lange, Norwalk, Conn., 1994, page 71 and Chapter 6.

[0209] By triabody the skilled person means a: trivalent homotrimeric scFv derivative (Kortt et al. 1997 Protein Engineering 10: 423-433). ScFv derivatives wherein VH-VL are fused directly without a linker sequence lead to the formation of trimers.

[0210] The Fab fragment [also designated as F(ab)] also contains the constant domain of the light chain and the first constant domain (CH1) of the heavy chain. Fab′ fragments differ from Fab fragments by the addition of a few residues at the carboxyl terminus of the heavy chain CH1 domain including one or more cysteines from the antibody hinge region. Fab′-SH is the designation herein for Fab′ in which the cysteine residue(s) of the constant domains have a free thiol group. F(ab′) fragments are produced by cleavage of the disulfide bond at the hinge cysteines of the F(ab′)₂ pepsin digestion product. Additional chemical couplings of antibody fragments are known to those of ordinary skill in the art.

[0211] A “bispecific” or “bifunctional antibody” is an artificial hybrid antibody having two different heavy/light chain pairs and two different binding sites. Bispecific antibodies can be produced by a variety of methods including fusion of hybridomas or linking of Fab′ fragments. See, e.g., Songsivilai & Lachmann, Clin. Exp. Immunol. 79:315-321 (1990); Kostelny et al., J. Immunol. 148, 1547-1553 (1992).

[0212] An antibody “which binds” an antigen of interest, e.g. a tumor-associated polypeptide antigen target, is one that binds the antigen with sufficient affinity such that the antibody is useful as a diagnostic and/or therapeutic agent in targeting a cell or tissue expressing the antigen, and does not significantly cross-react with other proteins. In such embodiments, the extent of binding of the antibody to a “non-target” protein will be less than about 10% of the binding of the antibody, oligopeptide or other organic molecule to its particular target protein as determined by fluorescence activated cell sorting (FACS) analysis or radioimmunoprecipitation (RIA). With regard to the binding of an antibody to a target molecule, the term “specific binding” or “specifically binds to” or is “specific for” a particular polypeptide or an epitope on a particular polypeptide target means binding that is measurably different from a non-specific interaction. Specific binding can be measured, for example, by determining binding of a molecule compared to binding of a control molecule, which generally is a molecule of similar structure that does not have binding activity. For example, specific binding can be determined by competition with a control molecule that is similar to the target, for example, an excess of non-labeled target. In this case, specific binding is indicated if the binding of the labeled target to a probe is competitively inhibited by excess unlabeled target.

[0213] A “species-dependent antibody,” e.g., a mammalian anti-human Notch1 antibody, is an antibody which has a stronger binding affinity for an antigen from a first mammalian species than it has for a homologue of that antigen from a second mammalian species. Normally, the species-dependent antibody “bind specifically” to a human antigen (i.e., has a binding affinity (Kd) value of no more than about 1×10−7 M, preferably no more than about 1×10−8 and most preferably no more than about 1×10−9 M) but has a binding affinity for homologue of the antigen from a second non-human mammalian species which is at least about 500 fold, or at least about 1000 fold, weaker than its binding affinity for the human antigen. The species-dependent antibody can be of any of the various types of antibodies as defined above, but preferably is a human antibody.

[0214] Antibody “effector functions” refer to those biological activities attributable to the Fc region (a native sequence Fc region or amino acid sequence variant Fc region) of an antibody, and vary with the antibody isotype. Examples of antibody effector functions include: Clq binding and complement dependent cytotoxicity; Fc receptor binding; antibody-dependent cell-mediated cytotoxicity (ADCC); phagocytosis; down regulation of cell surface receptors (e.g., B cell receptor); and B cell activation.

[0215] “Antibody-dependent cell-mediated cytotoxicity” or “ADCC” refers to a form of cytotoxicity in which secreted Ig bound onto Fc receptors (FcRs) present on certain cytotoxic cells (e.g., Natural Killer (NK) cells, neutrophils, and macrophages) enable these cytotoxic effector cells to bind specifically to an antigen-bearing target cell and subsequently kill the target cell with cytotoxins. The antibodies “arm” the cytotoxic cells and are absolutely required for such killing. The primary cells for mediating ADCC, NK cells, express FcyRIII only, whereas monocytes express FcγRI, FcγRII and FcγRIII. FcR expression on hematopoietic cells is summarized in Table 3 on page 464 of Ravetch and Kinet, Annu Rev. Immunol. 9:457-92 (1991). To assess ADCC activity of a molecule of interest, an in vitro ADCC assay, such as that described in U.S. Pat. No. 5,500,362 or 5,821,337 may be performed. Useful effector cells for such assays include peripheral blood mononuclear cells (PBMC) and Natural Killer (NK) cells. Alternatively, or additionally, ADCC activity of the molecule of interest may be assessed in vivo, e.g., in an animal model such as that disclosed in Clynes et al. Proc. Natl. Acad. Sci. U.S.A. 95:652-656 (1998).

[0216] “Complement dependent cytotoxicity” or “CDC” refers to the lysis of a target cell in the presence of complement. Activation of the classical complement pathway is initiated by the binding of the first component of the complement system (Clq) to antibodies (of the appropriate subclass) which are bound to their cognate antigen. To assess complement activation, a CDC assay, e.g., as described in Gazzano-Santoro et al., J. Immunol. Methods 202:163 (1996), may be performed.

[0217] “Human effector cells” are leukocytes which express one or more FcRs and perform effector functions. Preferably, the cells express at least FcγRIII and perform ADCC effector function. Examples of human leukocytes which mediate ADCC include peripheral blood mononuclear cells (PBMC), natural killer (NK) cells, monocytes, cytotoxic T cells and neutrophils; with PBMCs and NK cells being preferred. The effector cells may be isolated from a native source, e.g., from blood.

[0218] The term “cytotoxic agent” as used herein refers to a substance that inhibits or prevents the function of cells and/or causes destruction of cells. The term is intended to include radioactive isotopes (e.g. At 211, I 131, I 125, Y 90, Re 186, Re 188, Sm 153, Bi 212, P 32 and radioactive isotopes of Lu), chemotherapeutic agents e.g. methotrexate, adriamicin, vinca alkaloids (vincristine, vinblastine, etoposide), doxorubicin, melphalan, mitomycin C, chlorambucil, daunorubicin or other intercalating agents, enzymes and fragments thereof such as nucleolytic enzymes, antibiotics, and toxins such as small molecule toxins or enzymatically active toxins of bacterial, fungal. plant or animal origin, including fragments and/or variants thereof, and the various anti-tumor or anticancer agents disclosed below. Other cytotoxic agents are described below.

[0219] A “chemotherapeutic agent” is a chemical compound useful in the treatment of cancer. Examples of chemotherapeutic agents include adriamycin, doxorubicin, epirubicin, 5-fluorouracil, cytosine arabinoside (“Ara-C”), cyclophosphamide, thiotepa, busulfan, cytoxin, taxoids, e.g., paclitaxel (Taxol™, Bristol-Myers Squibb Oncology, Princeton, N.J.), and doxetaxel (Taxotere™, Rhone-Poulenc Rorer, Antony, France), toxotere, methotrexate, cisplatin, melphalan, vinblastine, bleomycin, etoposide, ifosfamide, mitomycin C, mitoxantrone, vincristine, vinorelbine, carboplatin, teniposide, daunomycin, carminomycin, aminopterin, dactinomycin, mitomycins, esperamicins (see U.S. Pat. No. 4,675,187), 6-thioguanine, 6-mercaptopurine, actinomycin D, VP-16, chlorambucil, melphalan, and other related nitrogen mustards. Also included in this definition are hormonal agents that act to regulate or inhibit hormone action on tumors such as tamoxifen and onapristone. A “glycosylation variant” “Glycoform variant” antibody herein is an antibody with one or more carbohydrate moieties attached thereto which differ from one or more carbohydrate moieties attached to a main species antibody. Examples of glycosylation variants herein include antibodies with a G1 or G2 oligosaccharide structure, instead of a GO oligosaccharide structure, attached to an Fc region thereof, antibody with one or two carbohydrate moieties attached to one or two light chains thereof, antibody with no carbohydrate attached to one or two heavy chains of the antibody, etc, as well as combinations of such glycosylation alterations.

[0220] “Glycosylation sites” refer to amino acid residues which are recognized by a eukaryotic cell as locations for the attachment of sugar residues. The amino acids where carbohydrate, such as oligosaccharide, is attached are typically asparagine (N-linkage), serine (O-linkage), and threonine (O-linkage) residues. The specific site of attachment is typically signaled by a sequence of amino acids, referred to herein as a “glycosylation site sequence”. The glycosylation site sequence for N-linked glycosylation is: -Asn-X-Ser- or -Asn-X-Thr-, where X may be any of the conventional amino acids, other than proline. The predominant glycosylation site sequence for O-linked glycosylation is: -(Thr or Ser)-X-X-Pro-, where X is any conventional amino acid. The recognition sequence for glycosaminoglycans (a specific type of sulfated sugar) is -Ser-Gly-X-Gly-, where X is any conventional amino acid. The terms“N-linked” and“O-linked” refer to the chemical group that serves as the attachment site between the sugar molecule and the amino acid residue. N-linked sugars are attached through an amino group; O-linked sugars are attached through a hydroxyl group. However, not all glycosylation site sequences in a protein are necessarily glycosylated; some proteins are secreted in both glycosylated and nonglycosylated forms, while others are fully glycosylated at one glycosylation site sequence but contain another glycosylation site sequence that is not glycosylated. Therefore, not all glycosylation site sequences that are present in a polypeptide are necessarily glycosylation sites where sugar residues are actually attached. The initial N-glycosylation during biosynthesis inserts the “core carbohydrate” or “core oligosaccharide” (Proteins, Structures and Molecular Principles, (1984) Creighton (ed.), W.H. Freeman and Company, New York, which is incorporated herein by reference).

[0221] A “V region glycosylation site” is a position in a variable region where a carbohydrate, typically an oligosaccharide, is attached to an amino acid residue in the polypeptide chain via an N-linked or O-linked covalent bond. Since not all glycosylation site sequences are necessarily glycosylated in a particular cell, a glycosylation site is defined operationally by reference to a designated cell type in which glycosylation occurs at the site, and is readily determined by one of ordinary skill in the art. Thus, a mutant antibody has at least one mutation that adds, subtracts, or relocates a V region glycosylation site, such as, for example, an N-linked glycosylation site sequence. Preferably, the mutation(s) are substitution mutations that introduce conservative amino acid substitutions, where possible, to modify a glycosylation site. Preferably, when the parent immunoglobulin sequence contains a glycosylation site in a V region framework, particularly in a location near the antigen binding site (for example, near a CDR), the glycosylation site sequence is mutated (e.g., by site-directed mutagenesis) to abolish the glycosylation site sequence, typically by producing a conservative amino acid substitution of one or more of the amino acid residues comprising the glycosylation site sequence. When the parent immunoglobulin sequence contains a glycosylation site in a CDR, and where the parent immunoglobulin specifically binds an epitope that contains carbohydrate, that glycosylation site is preferably retained. If the parent immunoglobulin specifically binds an epitope that comprises only polypeptide, glycosylation sites occuring in a CDR are preferably eliminated by mutation (e.g., site-directed mutation).

[0222] “Glycosylation-reduced antibodies” and “glycosylation-reduced immunoglobulin chains” are mutant antibodies and mutant immunoglobulin chains, respectively, in which at least one glycosylation site that is present in the parent sequence has been destroyed by mutation and is absent in the mutant sequence.

[0223] “Glycosylation-supplemented antibodies” and “glycosylation-supplemented immunoglobulin chains” are mutant antibodies and mutant immunoglobulin chains, respectively, in which at least one glycosylation site is present in the mutant sequence at a position where no glycosylation site occurs in the parent sequence. Typically, glycosylation-supplemented antibodies that have a higher binding affinity for a carbohydrate-containing epitope than does the parent antibody have a glycosylation site present in a CDR where the parent antibody does not. Typically, a glycosylation-supplemented antibody that specifically binds an epitope that contains polypeptide sequence but no carbohydrate have a lower affinity that the parental antibody.

[0224] “Parent immunoglobulin sequence” (or “parent immunoglobulin”) and “parent polynucleotide sequence” refer herein to a reference amino acid sequence or polynucleotide sequence, respectively. A parent polynucleotide sequence may encode a naturally-occurring immunoglobulin chain of a fragment thereof wherein glycosylation site sequences, if any, present in the V region occur about at the same relative amino acid residue position(s) at which glycosylation site sequence(s) are present in naturally-occurring immunoglobulin sequence(s) from which the parent sequence(s) were derived. When mutations, such as site-directed mutations, are introduced into a parent immunoglobulin sequence, the resultant sequence is referred to as a mutant immunoglobulin sequence (or a mutated immunoglobulin sequence).

[0225] As used herein, the twenty conventional amino acids and their abbreviations follow conventional usage (Immunology—A Synthesis, 2nd Edition, E. S. Golub and D. R. Gren, Eds., Sinauer Associates, Sunderland, Mass. (1991) which is incorporated herein by reference).

[0226] An antibody drug-conjugate (ADCs) is one approach for the treatment of cancer. (Braslawsky et al., Cancer Res, 1990; 50: 6608-14; Liu et al., Proc Natl Acad Sci USA, 1996; 93: 8618-23; Bernstein et al., Leukemia, 2000; 14: 474-5; Ross et al., Cancer Res, 2002; 62: 2546-53; Bhaskar et al., Cancer Res, 2003; 63: 6387-94; Doronina et al., Nat Biotechnol, 2003; 21: 778-84; Francisco et al., Blood, 2003; 102: 1458-65). The strategy of this approach is to deliver a toxic payload to the cancer cell via an antibody that targets a cancer-specific antigen. This strategy requires that the potent drug is internalized via the antibody-antigen complex, released within the cell and specifically kills the cancer cells (Bhaskar et al., Cancer Res, 2003; 63: 6387-94; Doronina et al., Nat Biotechnol, 2003; 21: 778-84; Francisco et al., Blood, 2003; 102: 1458-65). Ideally, the potent drug is internalized via the antibody-antigen complex, released within the cell and specifically kills the cancer cells. In order to minimize toxic side effects it is critical that the molecular target is not expressed in essential organs that are accessible to circulating antibodies. In addition, the target must be at the plasma membrane of cancer cells to allow antibody access.

[0227] The same criteria that make a target attractive for an ADC approach to cancer therapy are also desirable for an antibody dependent cellular cytotoxicity (ADCC) approach. In an ADCC approach, a naked antibody to the target is used to recruit immune effector cells (cytotoxic T lymphocytes, natural killer cells, activated macrophages) to the tumor. These effector cells then specifically kill the targeted tumor cells.

[0228] As used herein, the term “antibody phage library” refers to the phage library used in the affinity maturation process described above and in Hawkins et at., J. Mol Bio1.254: 889-896 (1992), and in Lowman et al., Biochemistry 30(45): 10832-10838 (1991). Each library comprises a hypervariable region (e.g. 6-7 sites) for which all possible amino acid substitutions are generated. The antibody mutants thus generated are displayed in a monovalent fashion from filamentous phage particles as fusions to the gene III product of M13 packaged within each particle and expressed on the exterior of the phage.

[0229] “Single-chain Fv” also abbreviated as “sFv” or “scFv” are antibody fragments that comprise the V H and V L antibody domains connected into a single polypeptide chain. Preferably, the sFv polypeptide further comprises a polypeptide linker between the V H and V L domains which enables the sFv to form the desired structure for antigen binding. For a review of sFv, see Pluckthun in The Pharmacology of Monoclonal Antibodies, vol. 113, Rosenburg and Moore eds., Springer-Verlag, New York, pp. 269-315 (1994); Borrebaeck 1995, infra

[0230] The term “diabodies” refers to small antibody fragments prepared by constructing sFv fragments (see preceding paragraph) with short linkers (about 5-10 residues) between the V H and V L domains such that inter-chain but not intra-chain pairing of the V domains is achieved, resulting in a bivalent fragment, i.e., fragment having two antigen-binding sites. Bispecific diabodies are heterodimers of two “crossover” sFv fragments in which the V H and V L domains of the two antibodies are present on different polypeptide chains. Diabodies are described more fully in, for example, EP 404,097; WO 93/11161; and Hollinger et al., Proc. Natl. Acad. Sci. USA, 90:6444-6448 (1993).

[0231] As used herein, “target molecule” means any molecule, not necessarily a protein, for which it is desirable to produce an antibody or ligand. Preferably, however, the target will be a protein and most preferably the target will be an antigen—Notch receptor or human Notch 1 or Notch1 and Notch3.

[0232] “Notch” encompasses all members of the Notch receptor family and in particular, Notch1. A “full length” Notch1 receptor protein or nucleic acid refers to a polypeptide or polynucleotide sequence, or a variant thereof, that contains all of the elements normally contained in one or more naturally occurring, wild type Notch1 polynucleotide or polypeptide sequences. For example, a full length Notch1 nucleic acid will typically comprise all of the exons that encode for the full length, naturally occurring protein. The “full length” may be prior to, or after, various stages of post-translation processing.

[0233] The term “epitope tagged” when used herein refers to a chimeric polypeptide comprising a polypeptide fused to a “tag polypeptide”. The tag polypeptide has enough residues to provide an epitope against which an antibody can be made, yet is short enough such that it does not interfere with activity of the polypeptide to which it is fused. The tag polypeptide preferably also is fairly unique so that the antibody does not substantially cross-react with other epitopes. Suitable tag polypeptides generally have at least six amino acid residues and usually between about 8 and 50 amino acid residues (preferably, between about 10 and 20 amino acid residues).

[0234] By “solid phase” is meant a non-aqueous matrix to which the antibody of the present invention can adhere. Examples of solid phases encompassed herein include those formed partially or entirely of glass (e.g., controlled pore glass), polysaccharides (e.g., agarose), polyacrylamides, polystyrene, polyvinyl alcohol and silicones. In certain embodiments, depending on the context, the solid phase can comprise the well of an assay plate; in others it is a purification column (e.g., an affinity chromatography column). This term also includes a discontinuous solid phase of discrete particles, such as those described in U.S. Pat. No. 4,275,149.

[0235] A “liposome” is a small vesicle composed of various types of lipids, phospholipids and/or surfactant which is useful for delivery of a drug (such as an IL-17A/F polypeptide or antibody thereto) to a mammal. The components of the liposome are commonly arranged in a bilayer formation, similar to the lipid arrangement of biological membranes.

[0236] A “small molecule” is defined herein to have a molecular weight below about 500 Daltons.

[0237] The term “prodrug” as used in this application refers to a precursor or derivative of a pharmaceutically active substance that is less cytotoxic to tumor cells compared to the parent drug and is capable of being enzymatically activated or converted into the more active parent form. See, e.g., Wilman, “Prodrugs in Cancer Chemotherapy,” Biochemical Society Transactions, 14, pp. 375-382, 615 Meeting, Belfast (1986) and Stella et al., (ed.), “Prodrugs: A Chemical Approach to Targeted Drug Delivery,” Directed Drug Delivery, Borchardt el al., (ed.), pp. 247-267, Human Press (1985. Examples of cytotoxic drugs that can be derivatized into a prodrug form for use in this invention include, but are not limited to, those chemotherapeutic agents described above.

[0238] An “antibody that inhibits the growth of cancer cells expressing Notch receptor or a “growth inhibitory” antibody is one which binds to and results in measurable growth inhibition of cancer cells expressing or overexpressing Notch receptor. Growth inhibition of tumor cells in vivo can be determined in various ways. The antibody is growth inhibitory in vivo if administration of the anti-Notch1 antibody at a therapeutically effective dose results in reduction in tumor size or tumor cell proliferation within a measurable period of time from the first administration of the antibody. Growth inhibition can be measured at an antibody concentration of about 0.1 to 30 μg/ml or about 0.5 nM to 200 nM in cell culture where the growth inhibition is determined 1-10 days after exposure of the tumor cells to the antibody.

[0239] The terms “cancer” “neoplasia” and “cancerous” refer to or describe any malignant neoplasm or spontaneous growth or proliferation of cells. The term as used herein encompasses both fully developed malignant neoplasms, as well as premalignant lesions. A subject having “cancer”, for example, may have a tumor.

[0240] A “Notch receptor-expressing cancer” is a cancer comprising cells that have Notch receptor protein present on the cell surface. A “Notch receptor-expressing cancer” produces sufficient levels of Notch receptor on the surface of cells thereof, such that a Notch receptor agonist/antagonist or antibody can bind thereto and have a therapeutic effect with respect to the cancer. A cancer which “overexpresses” Notch receptor is one which has significantly higher levels of Notch receptor at the cell surface thereof, compared to a noncancerous cell of the same tissue type. Notch receptor overexpression may be determined in a diagnostic or prognostic assay by evaluating increased levels of the Notch receptor protein present on the surface of a cell (e.g. via an immunohistochemistry assay; FACS analysis). Alternatively, or additionally, one may measure levels of Notch receptor-encoding nucleic acid or mRNA in the cell, e.g. via fluorescent in situ hybridization; (FISH; see WO98/45479 published October, 1998), Southern blotting, Northern blotting, or polymerase chain reaction (PCR) techniques, such as real time quantitative PCR (RT-PCR). One may also study Notch receptor overexpression by measuring shed antigen in a biological fluid such as serum, e.g, using antibody-based assays (see also, e.g., U.S. Pat. No. 4,933,294 issued Jun. 12, 1990; WO91/05264 published Apr. 18, 1991: U.S. Pat. No. 5,401,638 issued Mar. 28, 1995; and Sias et. al. J. Immunol. Methods 132: 73-80 (1990)). Aside from the above assays, various in vivo assays are available to the skilled practitioner. For example, one may expose cells within the body of the patient to an antibody which is optionally labeled with a detectable label, e.g. a radioactive isotope, and binding of the antibody to cells in the patient can be evaluated, e.g. by external scanning for radioactivity or by analyzing a biopsy taken from a patient previously exposed to the antibody.

[0241] “Alleviation of cancer” refers to both therapeutic treatment and prophylactic or preventative measures, wherein the object is to prevent or slow down (lessen) the targeted pathologic condition or disorder. Those in need of alleviation include those already with the disorder as well as those prone to have the disorder or those in whom the disorder is to be prevented. A subject or mammal is “alleviated” for a Notch receptor-expressing cancer if, after receiving a therapeutic amount of a Notch receptor agonist according to the methods of the present invention, the patient shows observable and/or measurable reduction in or absence of one or more of the following: reduction in the number of cancer cells or absence of the cancer cells, reduction in the tumor size; inhibition (i.e., slow to some extent and preferably stop) of cancer cell infiltration into peripheral organs; inhibition (i.e., slow to some extent and preferably stop) of tumor metastasis; inhibition, to some extent, of tumor growth; and/or relief to some extent, one or more of the symptoms associated with the specific cancer, and reduced morbidity and mortality. To the extent the Notch receptor agonist/antagonist or antibody may prevent growth and/or kill existing cancer cells, it may be cytostatic and/or cytotoxic. Reduction of these signs or symptoms may also be felt by the patient. Detection and measurement of these above indicators are known to those of skill in the art, including, but not limited for example, reduction in tumor burden, inhibition of tumor size, reduction in proliferation of secondary tumors, expression of genes in tumor tissue, presence of biomarkers, lymph node involvement, histologic grade, and nuclear grade.

[0242] The term “therapeutically effective amount” refers to an amount of an agonist and/or antagonist antibody effective to “alleviate” a disease or disorder in a subject or mammal. A “therapeutically effective amount”, in reference to the treatment of tumor, refers to an amount capable of invoking one or more of the following effects: (1) inhibition, to some extent, of tumor growth, including, slowing down and complete growth arrest; (2) reduction in the number of tumor cells; (3) reduction in tumor size; (4) inhibition (i.e., reduction, slowing down or complete stopping) of tumor cell infiltration into peripheral organs; (5) inhibition (i.e., reduction, slowing down or complete stopping) of metastasis; (6) enhancement of anti-tumor immune response, which may, but does not have to, result in the regression or rejection of the tumor; and/or (7) relief, to some extent, of one or more symptoms associated with the disorder. A “therapeutically effective amount” of a Notch1 antibody for purposes of treatment of tumor may be determined empirically and in a routine manner.

[0243] The term “inhibition of tumor volume” refers to any decrease or reduction in a tumor volume. The term “tumor volume” refers to the total size of the tumor, which includes the tumor itself plus affected lymph nodes if applicable. Tumor volume may be determined by a variety of methods known in the art, such as, e.g. by measuring the dimensions of the tumor using calipers, computed tomography (CT) or magnetic resonance imaging (MRI) scans, and calculating the volume using equations based on, for example, the z-axis diameter, or on standard shapes such as the sphere, ellipsoid, or cube.

[0244] The term “biologically active” (synonymous with “bioactive”) indicates that a composition or compound itself has a biological effect, or that it modifies, causes, promotes, enhances, blocks, reduces, limits the production or activity of, or reacts with or binds to an endogenous molecule that has a biological effect. A “biological effect” may be but is not limited to one that stimulates or causes an immunoreactive response; one that impacts a biological process in an animal; one that impacts a biological process in a pathogen or parasite; one that generates or causes to be generated a detectable signal; and the like. Biologically active compositions, complexes or compounds may be used in therapeutic, prophylactic and diagnostic methods and compositions. Biologically active compositions, complexes or compounds act to cause or stimulate a desired effect upon an animal. Non-limiting examples of desired effects include, for example, preventing, treating or curing a disease or condition in an animal suffering therefrom; limiting the growth of or killing a pathogen in an animal infected thereby; augmenting or altering the phenotype or genotype of an animal; and stimulating a prophylactic immunoreactive response in an animal.

[0245] In the context of therapeutic applications of the invention, the term “biologically active” indicates that the composition, complex or compound has an activity that impacts an animal suffering from a disease or disorder in a positive sense and/or impacts a pathogen or parasite in a negative sense. Thus, a biologically active composition, complex or compound may cause or promote a biological or biochemical activity within an animal that is detrimental to the growth and/or maintenance of a pathogen or parasite; or of cells, tissues or organs of an animal that have abnormal growth or biochemical characteristics, such as cancer cells, or cells affected by autoimmune or inflammatory disorders.

[0246] In the context of prophylactic applications of the invention, the term “biologically active” indicates that the composition or compound induces or stimulates an immunoreactive response. In some embodiments, the immunoreactive response is designed to be prophylactic, i.e., prevents infection by a pathogen. In other embodiments, the immunoreactive response is designed to cause the immune system of an animal to react to the detriment of cells of an animal, such as cancer cells, that have abnormal growth or biochemical characteristics. In this application of the invention, compositions, complexes or compounds comprising antigens are formulated as a vaccine.

[0247] It will be understood by those skilled in the art that a given composition, complex or compound may be biologically active in therapeutic, diagnostic and prophylactic applications. A composition, complex or compound that is described as being “biologically active in a cell” is one that has biological activity in vitro (i.e., in a cell culture) or in vivo (i.e., in the cells of an animal). A “biologically active portion” of a compound or complex is a portion thereof that is biologically active once it is liberated from the compound or complex. It should be noted, however, that such a component may also be biologically active in the context of the compound or complex.

[0248] In order to achieve a biological effect, invention constructs may comprise an additional moiety to facilitate internalization and/or uptake by a target cell.

[0249] A “patient” or “subject” or “host” refers to either a human or non-human animal.

[0250] “Treatment” refers to both therapeutic treatment and prophylactic or preventative measures. Those in need of treatment include those already with the disorder as well as those in which the disorder is to be prevented. The above parameters for assessing successful treatment and improvement in the disease are readily measurable by routine procedures familiar to a physician. For cancer therapy, efficacy can be measured, for example, by assessing the time to disease progression (TTP) and/or determining the response rate (RR). For prostate cancer, the progress of therapy can be assessed by routine methods, usually by measuring serum PSA (prostate specific antigen) levels; the higher the level of PSA in the blood, the more extensive the cancer. Commercial assays for detecting PSA are available, e.g, Hybritech Tandem-E® and Tandem-R® PSA assay kits, the Yang ProsCheck® polyclonal assay (Yang Labs, Bellevue, Wash.), Abbott Imx® (Abbott Labs, Abbott Park, Ill.), etc. Metastasis can be determined by staging tests and by bone scan and tests for calcium level and other enzymes to determine spread to the bone. CT scans can also be done to look for spread to the pelvis and lymph nodes in the area. Chest X-rays and measurement of liver enzyme levels by known methods are used to look for metastasis to the lungs and liver, respectively. Other routine methods for monitoring the disease include transrectal ultrasonography (TRUS) and transrectal needle biopsy (TRNB).

[0251] The phrase “pharmaceutically acceptable” is employed herein to refer to those compounds, materials, compositions, and/or dosage forms which are, within the scope of sound medical judgment, suitable for use in contact with the tissues of human beings and animals without excessive toxicity, irritation, allergic response, or other problem or complication, commensurate with a reasonable benefit/risk ratio.

[0252] An “agonist” or “antagonist” of Notch receptor in addition to binding Notch receptor, has a direct effect on a Notch receptor bearing cell. The Notch receptor agonist will bind Notch receptor, and as well, initiate or mediate the signaling event associated with the Notch receptor, such as, for example, to cause the intracellular domain of Notch to be cleaved and translocated to the nucleus. Here it induces the synthesis of transcriptional repressors members of the Hes family as for example HES-1. When ECD truncated forms of Notch are tested, the HES-1 promoter is strongly stimulated. Activation of the HES-1 promoter can be assayed in vitro. The ability to induce Notch receptor activation can be quantified using techniques known in the art such as reporter constructs such as Beta-galactosidase, chloramphenicol acetyl transferase (CAT) or luciferase. The Notch receptor antagonist will inhibit signaling transmitted from the Notch receptor through various mechanisms including blocking cleavage of the intracellular domain or stimulating receptor degradation.

[0253] The Notch receptor “antagonist” will inhibit signaling transmitted from the Notch receptor through various mechanisms including blocking cleavage of the intracellular domain, blocking binding of the endogenous ligand to the receptor or stimulating receptor degradation. The term “antagonist” is used in the broadest sense, and includes any molecule that partially or fully blocks, inhibits, or neutralizes a biological activity of a native Notch receptor protein.

[0254] Suitable agonist or antagonist molecules specifically include agonist or antagonist antibodies or antibody fragments, fragments or amino acid sequence variants thereof etc. Methods for identifying agonists or antagonists of a Notch receptor polypeptide are known in the art. An exemplary method proposes contacting a Notch1 bearing cells or tissue with a candidate agonist or antagonist molecule and measuring a detectable change in one or more biological activities normally associated with the Notch receptor.

[0255] Additional downstream targets of the Notch signal transduction pathway may be used as biomarkers to evaluate the effects of Notch receptor agonists or antagonists. Recent work suggests that expression of the HESS gene, which encodes an E(spl)-like protein, depends on an intact Notch signaling pathway (Davis and Turner, 2001, Oncogene, 20, 8342-8357). HES5 expression is reduced or abolished in mice mutant for Notch1, RBP-Jx, or presenilin1 and 2 (presenilins are required for Notch proteolytic activation) (de la Pompa et al., 1997, Development, 124, 1139-1148). Notch signaling has also been observed to regulate expression of the Hey genes in mice. Expression of the Hey genes in mouse embryos depends on function of the Notch ligand Dll-1 (Kokubo et al., 1999, Biochem. Biophys. Res. Commun., 260, 459-465). Consistent with this, the promoter regions of the three mammalian Hey genes contain binding sites for CSL proteins, and these promoters are responsive in cultured cells to activated Notch signaling (Maier and Gessler, 2000, Biochem. Biophys. Res. Commun., 275, 652-660). Transgenic expression of activated Notch in mouse hair follicles leads to ectopic expression of the HeyL gene, while mutant mice for Notch 1 or the Notch ligand Dll-1 lose expression of HeyL in the presomitic mesoderm (Lin et al., 2000, Development, 127, 2421-2432).

[0256] “Mammal” for purposes of treatment refers to any animal classified as a mammal, including humans, domestic and farm animals, and zoo, sports, or pet animals, such as dogs, cats, cattle, horses, sheep, pigs, goats, rabbits, etc. Preferably, the mammal is human.

[0257] The term “administering” includes any method of delivery of a compound of the present invention, including but not limited to, a pharmaceutical composition or therapeutic agent, into a subject's system or to a particular region in or on a subject. The phrases “systemic administration,” “administered systemically,” “peripheral administration” and “administered peripherally” as used herein mean the administration of a compound, drug or other material other than directly into the central nervous system, such that it enters the patient's system and, thus, is subject to metabolism and other like processes, for example, subcutaneous administration. “Parenteral administration” and “administered parenterally” means modes of administration other than enteral and topical administration, usually by injection, and includes, without limitation, intravenous, intramuscular, intraarterial, intrathecal, intracapsular, intraorbital, intracardiac, intradermal, intraperitoneal, transtracheal, subcutaneous, subcuticular, intra-articular, subcapsular, subarachnoid, intraspinal and intrasternal injection and infusion.

[0258] Administration “in combination with” one or more further therapeutic agents includes simultaneous (concurrent) and consecutive administration in any order.

[0259] The term “modulate” means to affect (e.g., either upregulate, downregulate or otherwise control) the level of a signaling pathway. Cellular processes under the control of signal transduction include, but are not limited to, transcription of specific genes, normal cellular functions, such as metabolism, proliferation, differentiation, adhesion, apoptosis and survival, as well as abnormal processes, such as transformation, blocking of differentiation and metastasis.

[0260] A “disorder” is any condition that would benefit from treatment with the polypeptide. This includes chronic and acute disorders or diseases including those pathological conditions which predispose the mammal to the disorder in question.

[0261] “Chronic” administration refers to administration of the agent(s) in a continuous mode as opposed to an acute mode, so as to maintain the initial therapeutic effect (activity) for an extended period of time. “Intermittent” administration is treatment that is not consecutively done without interruption, but rather is cyclic in nature.

[0262] Completely “human” antibodies may be desirable for therapeutic treatment of human patients. Human antibodies can be made by a variety of methods known in the art including phage display methods described above using antibody libraries derived from human immunoglobulin sequences. See U.S. Pat. Nos. 4,444,887 and 4,716,111; and PCT publications WO 98/46645; WO 98/50433; WO 98/24893; WO 98/16654; WO 96/34096; WO 96/33735; and WO 91/10741, each of which is incorporated herein by reference in its entirety. Human antibodies can also be produced using transgenic mice which are incapable of expressing functional endogenous immunoglobulins, but which can express human immunoglobulin genes, see, e.g., PCT publications WO 98/24893; WO 92/01047; WO 96/34096; WO 96/33735; European Patent No. 0 598 877; U.S. Pat. Nos. 5,413,923; 5,625,126; 5,633,425; 5,569,825; 5,661,016; 5,545,806; 5,814,318; 5,885,793; 5,916,771; and 5,939,598, which are incorporated by reference herein in their entireties. In addition, companies such as Abgenix, Inc. (Fremont, Calif.) and Medarex (Princeton, N.J.) can be engaged to provide human antibodies directed against a selected antigen using technology similar to that described above.

[0263] Completely human antibodies that recognize a selected epitope can be generated using a technique referred to as “guided selection.” In this approach a selected non-human monoclonal antibody, e.g., a mouse antibody, is used to guide the selection of a completely human antibody recognizing the same epitope (Jespers et al., Biotechnology 12:899-903 (1988).

[0264] An “effector” or “effector moiety” or “effector component” is a molecule that is bound (or linked, or conjugated), either covalently, through a linker or a chemical bond, or noncovalently, through ionic, van der Waals, electrostatic, or hydrogen bonds, to an antibody. The “effector” can be a variety of molecules including, e.g., detection moieties including radioactive compounds, fluorescent compounds, an enzyme or substrate, tags such as epitope tags, a toxin, activatable moieties, a chemotherapeutic or cytotoxic agent, a chemoattractant, a lipase; an antibiotic; or a radioisotope emitting “hard” e.g., beta radiation.

[0265] The same criteria that make a target attractive for an ADC approach to cancer therapy are also desirable for an antibody dependent cellular cytotoxicity (ADCC) approach. In an ADCC approach, a naked antibody to the target is used to recruit immune effector cells (cytotoxic T lymphocytes, natural killer cells, activated macrophages) to the tumor. These effector cells then specifically kill the targeted tumor cells.

[0266] “Biological sample” as used herein is a sample of biological tissue or cells that contains nucleic acids or polypeptides, e.g., Notch1 or Notch3 protein, polynucleotide or transcript. Such samples include, but are not limited to, tissue isolated from primates (e.g., humans) or from rodents (e.g., mice, and rats). Biological samples may also include sections of tissues such as biopsy and autopsy samples, frozen sections taken for histologic purposes, skin, etc. Biological samples also include explants and primary and/or transformed cell cultures derived from patient tissues. A biological sample is typically obtained from a eukaryotic organism, most preferably a mammal such as a primate e.g., human.

[0267] “Providing a biological sample” means to obtain a biological sample for use in methods described in this invention. Most often, this will be done by removing a sample of cells from a human, but can also be accomplished by using previously isolated cells (e.g., isolated by another person, at another time, and/or for another purpose), or by performing the methods of the invention in vivo.

[0268] “Tumor”, as used herein, refers to all neoplastic cell growth and proliferation, whether malignant or benign, and all pre-cancerous and cancerous cells and tissues.

[0269] “Notch” encompasses all members of the Notch receptor family and in particular, Notch1 and Notch3.

[0270] The Notch ligands include Jagged1, Jagged2, Delta1, Delta3, and Delta4. “Notch1” cDNA and deduced amino acid sequence is as set forth in SEQ ID NO:1 and SEQ ID NO:2, respectively.

[0271] A “label” or a “detectable moiety” is a composition detectable by spectroscopic, photochemical, biochemical, immunochemical, chemical, or other physical means. The word “label” when used herein refers to a detectable compound or composition which is conjugated directly or indirectly to the antibody so as to generate a “labeled” antibody. The label may be detectable by itself (e.g. radioisotope labels or fluorescent labels) or, in the case of an enzymatic label, may catalyze chemical alteration of a substrate compound or composition which is detectable. For example, useful labels include fluorescent dyes, electron-dense reagents, enzymes (e.g., as commonly used in an ELISA), biotin, digoxigenin, colloidal gold, luminescent nanocrystals (e.g. quantum dots), haptens and proteins or other entities which can be made detectable, e.g., by incorporating a radiolabel into the peptide or used to detect antibodies specifically reactive with the peptide. The radioisotope may be, for example, ³H, ¹⁴C, ³²P, ³⁵S, or ¹²⁵I. In some cases, particularly using antibodies against the proteins of the invention, the radioisotopes are used as toxic moieties, as described below. Any method known in the art for conjugating the antibody to the label may be employed. The lifetime of radiolabeled peptides or radiolabeled antibody compositions may be extended by the addition of substances that stabilize the radiolabeled peptide or antibody and protect it from degradation. Any substance or combination of substances that stabilize the radiolabeled antibody may be used including those substances disclosed in U.S. Pat. No. 5,961,955, which is incorporated by reference herein in its entirety.

### Antibody Structure

[0272] Naturally occurring (wildtype) antibody molecules are Y-shaped molecules consisting of four polypeptide chains, two identical heavy chains and two identical light chains, which are covalently linked together by disulfide bonds. Both types of polypeptide chains have constant regions, which do not vary or vary minimally among antibodies of the same class (i.e., IgA, IgM, etc.), and variable regions. The variable regions are unique to a particular antibody and comprise a recognition element for an epitope. The carboxy-terminal regions of both heavy and light chains are conserved in sequence and are called the constant regions (also known as C-domains). The amino-terminal regions (also known as V-domains) are variable in sequence and are responsible for antibody specificity. The antibody specifically recognizes and binds to an antigen mainly through six short complementarity-determining regions (CDRs) located in their V-domains.

[0273] Each light chain of an antibody is associated with one heavy chain, and the two chains are linked by a disulfide bridge formed between cysteine residues in the carboxy-terminal region of each chain, which is distal from the amino terminal region of each chain that constitutes its portion of the antigen binding domain. Antibody molecules are further stabilized by disulfide bridges between the two heavy chains in an area known as the hinge region, at locations nearer the carboxy terminus of the heavy chains than the locations where the disulfide bridges between the heavy and light chains are made. The hinge region also provides flexibility for the antigen-binding portions of an antibody.

[0274] An antibody's specificity is determined by the variable regions located in the amino terminal regions of the light and heavy chains. The variable regions of a light chain and associated heavy chain form an “antigen binding domain” that recognizes a specific epitope; an antibody thus has two antigen binding domains. The antigen binding domains in a wild type antibody are directed to the same epitope of an immunogenic protein, and a single wild type antibody is thus capable of binding two molecules of the immunogenic protein at the same time. Thus, a wild type antibody is monospecific (i.e., directed to a unique antigen) and divalent (i.e., capable of binding two molecules of antigen).

### Types of Antibodies

[0275] “Polyclonal antibodies” are generated in an immunogenic response to a protein having many epitopes. A composition (e.g., serum) of polyclonal antibodies thus includes a variety of different antibodies directed to the same and to different epitopes within the protein. Methods for producing polyclonal antibodies are known in the art (see, e.g., Cooper et al., Section III of Chapter 11 in: Short Protocols in Molecular Biology, 2nd Ed., Ausubel et al., eds., John Wiley and Sons, New York, 1992, pages 11-37 to 11-41).

[0276] “Antipeptide antibodies” (also known as “monospecific antibodies”) are generated in a humoral response to a short (typically, 5 to 20 amino acids) immunogenic polypeptide that corresponds to a few (preferably one) isolated epitopes of the protein from which it is derived. A plurality of antipeptide antibodies includes a variety of different antibodies directed to a specific portion of the protein, i.e., to an amino acid sequence that contains at least one, preferably only one, epitope. Methods for producing antipeptide antibodies are known in the art (see, e.g., Cooper et al., Section III of Chapter 11 in: Short Protocols in Molecular Biology, 2nd Ed., Ausubel et al., eds., John Wiley and Sons, New York, 1992, pages 11-42 to 11-46).

[0277] A “Monoclonal antibody” is a specific antibody that recognizes a single specific epitope of an immunogenic protein. In a plurality of a monoclonal antibody, each antibody molecule is identical to the others in the plurality. In order to isolate a monoclonal antibody, a clonal cell line that expresses, displays and/or secretes a particular monoclonal antibody is first identified; this clonal cell line can be used in one method of producing the antibodies of the invention. Methods for the preparation of clonal cell lines and of monoclonal antibodies expressed thereby are known in the art (see, for example, Fuller et al., Section II of Chapter 11 in: Short Protocols in Molecular Biology, 2nd Ed., Ausubel et al., eds., John Wiley and Sons, New York, 1992, pages 11-22 to 11-11-36).

[0278] A “Naked antibody” is an antibody that lacks the Fc portion of a wildtype antibody molecule. The Fc portion of the antibody molecule provides effector functions, such as complement fixation and ADCC (antibody dependent cell cytotoxicity), which set mechanisms into action that may result in cell lysis. See, e.g., Markrides, Therapeutic inhibition of the complement system, Pharmacol. Rev. 50:59-87, 1998. In some systems, it appears that the therapeutic action of an antibody depends upon the effector functions of the Fc region (see, e.g., Golay et al., Biologic response of B lymphoma cells to anti-CD20 monoclonal antibody rituximab in vitro: CD55 and CD59 regulate complement-mediated cell lysis, Blood 95:3900-3908, 2000).

[0279] However, it is possible that the Fc portion is not required for therapeutic function in every instance, as other mechanisms, such as apoptosis, can come into play. Moreover, the Fc region may be deleterious in some applications as antibodies comprising an Fc region are taken up by Fc receptor-bearing cells, thereby reducing the amount of therapeutic antibody taken up by targeted cells. Vaswani and Hamilton, Humanized antibodies as potential therapeutic drugs, Ann. Allergy Asthma Immunol. 81:105-119, 1998. Components of the immune system may recognize and react to antibodies that are clumped together on the surface of tumor cells. It is thus envisioned that the resulting immune response will target and destroy, or at least limit the proliferation of, the tumor cells.

[0280] One way to get naked antibodies delivered to surfaces where they will clump together is to use a targetable construct or complex to bring different naked antibodies together on a targeted cellular surface. By way of non-limiting example, an anti-C20 antibody (e.g., Rituxan) and an anti-C22 antibody might be administered separately or together, allowed to clear so that unbound antibodies are removed from the system.

[0281] Naked antibodies are also of interest for therapy of diseases caused by parasites, such as malaria. Vukovic et al., Immunoglobulin G3 antibodies specific for the 19-kilodalton carboxyl-terminal fragment of Plasmodium yoelii merozoite surface protein 1 transfer protection to mice deficient in Fc-RI receptors, Infect. Immun. 68:3019-22, 2000.

[0282] “Single chain antibodies (scFv)” generally do not include portions of the Fc region of antibodies that are involved in effector functions and are thus naked antibodies, although methods are known for adding such regions to known scFv molecules if desired. See Helfrich et al., A rapid and versatile method for harnessing scFv antibody fragments with various biological functions, J. Immunol. Meth. 237:131-145,2000; and de Haard et al., Creating and engineering human antibodies for immunotherapy, Adv. Drug Delivery Rev. 31:5-31, 1998.

### Antibody Fragments

### Proteolytic Antibody Fragments

[0283] Antibody fragments produced by limited proteolysis of wild type antibodies are called proteolytic antibody fragments. These include, but are not limited to, the following.

[0284] “F(ab′)₂ fragments” are released from an antibody by limited exposure of the antibody to a proteolytic enzyme, e.g., pepsin or ficin. An F(ab′)₂ fragment comprises two “arms,” each of which comprises a variable region that is directed to and specifically binds a common antigen. The two Fab′ molecules are joined by interchain disulfide bonds in the hinge regions of the heavy chains; the Fab′ molecules may be directed toward the same (bivalent) or different (bispecific) epitopes.

[0285] “Fab′ fragments” contain a single anti-binding domain comprising an Fab and an additional portion of the heavy chain through the hinge region.

[0286] “Fab′-SH fragments” are typically produced from F(ab′)₂ fragments, which are held together by disulfide bond(s) between the H chains in an F(ab′)₂ fragment. Treatment with a mild reducing agent such as, by way of non-limiting example, beta-mercaptoethylamine, breaks the disulfide bond(s), and two Fab′ fragments are released from one F(ab′)₂ fragment. Fab′-SH fragments are monovalent and monospecific.

[0287] “Fab fragments” (i.e., an antibody fragment that contains the antigen-binding domain and comprises a light chain and part of a heavy chain bridged by a disulfide bond) are produced by papain digestion of intact antibodies. A convenient method is to use papain immobilized on a resin so that the enzyme can be easily removed and the digestion terminated. Fab fragments do not have the disulfide bond(s) between the H chains present in an F(ab′)₂ fragment.

### Recombinant Antibody Fragments

[0288] “Single-chain antibodies” are one type of antibody fragment. The term single chain antibody is often abbreviated as “scFv” or “sFv.” These antibody fragments are produced using molecular genetics and recombinant DNA technology. A single-chain antibody consists of a polypeptide chain that comprises both a V_{H} and a V_{L} portion. Unlike wildtype antibodies, wherein two separate heavy and light polypeptide chains are conjoined to form a single antigen-binding variable region, a single-chain antibody is a single polypeptide that comprises an antigen-binding variable region. That is, a single-chain antibody comprises the variable, antigen-binding determinative region of a single light and heavy chain of an antibody linked together by a chain of 10-25 amino acids.

[0289] The term “single-chain antibody” includes but is not limited to a disulfide-linked Fv (dsFv) in which two single-chain antibodies linked together by a disulfide bond; a bispecific sFv (a sFv or a dsFv molecule having two antigen-binding domains, each of which may be directed to a different epitope); a diabody (a dimerized sFv formed when the V_{H} domain of a first sFv assembles with the V_{L} domain of a second sFv and the V_{L} domain of the first sFv assembles with the V_{H} domain of the second sFv; the two antigen-binding regions of the diabody may be directed towards the same or different epitopes); and a triabody (a trimerized sFv, formed in a manner similar to a diabody, but in which three antigen-binding domains are created in a single complex; the three antigen binding domains may be directed towards the same or different epitopes).

[0290] “Fully human antibodies” are human antibodies that can be produced in transgenic animals such as XenoMice™. XenoMouse™ strains are genetically engineered mice in which the murine IgH and Igk loci have been functionally replaced by their human Ig counterparts on yeast artificial YAC transgenes. These human Ig transgenes can carry the majority of the human variable repertoire and can undergo class switching from IgM to IgG isotypes. The immune system of the XenoMouse™ recognizes administered human antigens as foreign and produces a strong humoral response. The use of XenoMouse™ in conjunction with well-established hybridomas techniques, results in fully human IgG mAbs with sub-nanomolar affinities for human antigens (see U.S. Pat. No. 5,770,429, entitled “Transgenic non-human animals capable of producing heterologous antibodies”, U.S. Pat. No. 6,162,963, entitled “Generation of xenogenetic antibodies”; U.S. Pat. No. 6,150,584, entitled “Human antibodies derived from immunized XenoMice™”, U.S. Pat. No. 6,114,598, entitled “Generation of xenogeneic antibodies”; and U.S. Pat. No. 6,075,181, entitled “Human antibodies derived from immunized XenoMice™”; for reviews, see Green, Antibody engineering via genetic engineering of the mouse: XenoMouse™ strains are a vehicle for the facile generation of therapeutic human monoclonal antibodies, J. Immunol. Meth. 231:11-23, 1999; Wells, Eek, a XenoMouse™: Abgenix, Inc., Chem. Biol. 7:R185-6, 2000; and Davis et al., Transgenic mice as a source of filly human antibodies for the treatment of cancer, Cancer Metastasis Rev. 18:421-5, 1999).

[0291] “Complementary determining region peptides” or “CDR peptides” are another form of an antibody fragment. A CDR peptide (also known as “minimal recognition unit”) is a peptide corresponding to a single complementarity-determining region (CDR), and can be prepared by constructing genes encoding the CDR of an antibody of interest. Such genes are prepared, for example, by using the polymerase chain reaction to synthesize the variable region from RNA of antibody-producing cells. See, for example, Larrick et al., Methods: A Companion to Methods in Enzymology 2:106, 1991.

Compositions of the Invention and Methods of making same

[0292] This invention encompasses encompasses a plurality of substantially pure, isolated anti-Notch1 isolated antibodies and polynucleotide embodiments. Explicitly included are compositions, including pharmaceutical compositions, comprising an anti-Notch1 antibody; and polynucleotides comprising sequences encoding an anti-Notch1 antibody. As used herein, compositions comprise one or more antibodies that bind to Notch1, and/or one or more polynucleotides comprising sequences encoding one or more antibodies that bind to Notch1. These compositions may further comprise suitable carriers, such as pharmaceutically acceptable excipients including buffers, which are well known in the art.

[0293] The anti-Notch1 antibodies of the invention are preferably monoclonal. Also encompassed within the scope of the invention are Fab, Fab′, Fab′-SH and F(ab′)₂ fragments of the anti-Notch1 antibodies provided herein. Single chain anti-Notch 1 antibodies as well as multispecific and multivariant Notch1 specific antibodies are also included. These antibody fragments can be created by traditional means, such as enzymatic digestion, or may be generated by recombinant techniques. These fragments are useful for the diagnostic and therapeutic purposes set forth below.

[0294] Monoclonal antibodies are obtained from a population of substantially homogeneous antibodies, i.e., the individual antibodies comprising the population are identical except for possible naturally occurring mutations that may be present in minor amounts. Thus, the modifier “monoclonal” indicates the character of the antibody as not being a mixture of discrete antibodies.

[0295] The anti-Notch1 monoclonal antibodies of the invention are preferably made by recombinant DNA methods (U.S. Pat. No. 4,816,567).

[0296] The binding specificity of monoclonal antibodies produced by recombinant means is determined by immunoprecipitation or by an in vitro binding assay, such as radioimmunoassay (RIA) or enzyme-linked immunoadsorbent assay (ELISA).

[0297] The binding affinity of the monoclonal antibody can, for example, be determined by the Scatchard analysis of Munson et al., Anal. Biochem., 107:220 (1980).

[0298] The anti-Notch1 antibodies of the invention can be made by using combinatorial libraries to screen for synthetic antibody clones with the desired activity or activities. In principle, synthetic antibody clones are selected by screening phage libraries containing phage that display various fragments of antibody variable region (Fv) fused to phage coat protein. Such phage libraries are panned by affinity chromatography against the desired antigen. Clones expressing Fv fragments capable of binding to the desired antigen are adsorbed to the antigen and thus separated from the non-binding clones in the library. The binding clones are then eluted from the antigen, and can be further enriched by additional cycles of antigen adsorption/elution. Any of the anti-Notch1 antibodies of the invention can be obtained by designing a suitable antigen screening procedure to select for the phage clone of interest followed by construction of a full length anti-Notch1 antibody clone using the Fv sequences from the phage clone of interest and suitable constant region (Fc) sequences described in Kabat et al., Sequences of Proteins of Immunological Interest, Fifth Edition, NIH Publication 91-3242, Bethesda Md. (1991), vols. 1-3.

[0299] The antigen-binding domain of an antibody is formed from two variable (V) regions of about 110 amino acids, one each from the light (VL) and heavy (VH) chains, that both present three hypervariable loops or complementarity-determining regions (CDRs). Variable domains can be displayed functionally on phage, either as single-chain Fv (scFv) fragments, in which VH and VL are covalently linked through a short, flexible peptide, or as Fab fragments, in which they are each fused to a constant domain and interact non-covalently, as described in Winter et al., Ann. Rev. Immunol., 12: 433-455 (1994). As used herein, scFv encoding phage clones and Fab encoding phage clones are collectively referred to as “Fv phage clones” or “Fv clones”.

[0300] Repertoires of VH and VL genes can be separately cloned by polymerase chain reaction (PCR) and recombined randomly in phage libraries, which can then be searched for antigen-binding clones as described in Winter et al., Ann. Rev. Immunol., 12: 433-455 (1994). Libraries from immunized sources provide high-affinity antibodies to the immunogen without the requirement of constructing hybridomas. Alternatively, the naive repertoire can be cloned to provide a single source of human antibodies to a wide range of non-self and also self antigens without any immunization as described by Griffiths et al., EMBO J. 12: 725-734 (1993). Finally, naive libraries can also be made synthetically by cloning the unrearranged V-gene segments from stem cells, and using PCR primers containing random sequence to encode the highly variable CDR3 regions and to accomplish rearrangement in vitro as described by Hoogenboom and Winter, J. Mol. Biol., 227: 381-388 (1992).

[0301] Filamentous phage is used to display antibody fragments by fusion to the minor coat protein pIII. The antibody fragments can be displayed as single chain Fv fragments, in which VH and VL domains are connected on the same polypeptide chain by a flexible polypeptide spacer, e.g. as described by Marks et al., J. Mol. Biol., 222: 581-597 (1991), or as Fab fragments, as described in Hoogenboom et al., Nucl. Acids Res., 19: 4133-4137 (1991).

[0302] In general, nucleic acids encoding antibody gene fragments are obtained from immune cells harvested from humans. If a library biased in favor of anti-Notch1 clones is desired, the subject is immunized with Notch1 to generate an antibody response, and spleen cells and/or circulating B cells other peripheral blood lymphocytes (PBLs) are recovered for library construction. In another embodiment, a human antibody gene fragment library biased in favor of anti-Notch1 clones is obtained by generating an anti-Notch1 antibody response in transgenic mice carrying a functional human immunoglobulin gene array (and lacking a functional endogenous antibody production system) such that Notch1 immunization gives rise to B cells producing human antibodies against Notch1. The generation of human antibody-producing transgenic mice is described below.

[0303] Additional enrichment for anti-Notch1 reactive cell populations can be obtained by using a suitable screening procedure to isolate B cells expressing Notch1-specific membrane bound antibody, e.g., by cell separation with Notch1 affinity chromatography or adsorption of cells to fluorochrome-labeled Notch1 followed by flow-activated cell sorting (FACS).

[0304] Alternatively, the use of spleen cells and/or B cells or other PBLs from an unimmunized donor provides a better representation of the possible antibody repertoire, and also permits the construction of an antibody library using any animal (human or non-human) species in which Notch1 is not antigenic. For libraries incorporating in vitro antibody gene construction, stem cells are harvested from the subject to provide nucleic acids encoding unrearranged antibody gene segments. The immune cells of interest can be obtained from a variety of animal species, such as human, mouse, rat, lagomorpha, luprine, canine, feline, porcine, bovine, equine, and avian species, etc.

[0305] Nucleic acid encoding antibody variable gene segments (including VH and VL segments) are recovered from the cells of interest and amplified. In the case of rearranged VH and VL gene libraries, the desired DNA can be obtained by isolating genomic DNA or mRNA from lymphocytes followed by polymerase chain reaction (PCR) with primers matching the 5′ and 3′ ends of rearranged VH and VL genes as described in Orlandi et al., Proc. Natl. Acad. Sci. (USA), 86: 3833-3837 (1989), thereby making diverse V gene repertoires for expression. The V genes can be amplified from cDNA and genomic DNA, with back primers at the 5′ end of the exon encoding the mature V-domain and forward primers based within the J-segment as described in Orlandi et al. (1989) and in Ward et al., Nature, 341: 544-546 (1989). However, for amplifying from cDNA, back primers can also be based in the leader exon as described in Jones et al., Biotechnol., 9: 88-89 (1991), and forward primers within the constant region as described in Sastry et al., Proc. Natl. Acad. Sci. (USA), 86: 5728-5732 (1989). To maximize complementarity, degeneracy can be incorporated in the primers as described in Orlandi et al. (1989) or Sastry et al. (1989). Preferably, the library diversity is maximized by using PCR primers targeted to each V-gene family in order to amplify all available VH and VL arrangements present in the immune cell nucleic acid sample, e.g. as described in the method of Marks et al., J. Mol. Biol., 222: 581-597 (1991) or as described in the method of Orum et al., Nucleic Acids Res., 21: 4491-4498 (1993). For cloning of the amplified DNA into expression vectors, rare restriction sites can be introduced within the PCR primer as a tag at one end as described in Orlandi et al. (1989), or by further PCR amplification with a tagged primer as described in Clackson et al., Nature, 352: 624-628 (1991).

[0306] Repertoires of synthetically rearranged V genes can be derived in vitro from V gene segments. Most of the human VH-gene segments have been cloned and sequenced (reported in Tomlinson et al., J. Mol. Biol., 227: 776-798 (1992)), and mapped (reported in Matsuda et al., Nature Genet., 3: 88-94 (1993); these cloned segments (including all the major conformations of the H1 and H2 loop) can be used to generate diverse VH gene repertoires with PCR primers encoding H3 loops of diverse sequence and length as described in Hoogenboom and Winter, J. Mol. Biol., 227: 381-388 (1992). VH repertoires can also be made with all the sequence diversity focused in a long H3 loop of a single length as described in Barbas et al., Proc. Natl. Acad. Sci. USA, 89: 4457-4461 (1992). Human V.kappa. and Vλ segments have been cloned and sequenced (reported in Williams and Winter, Eur. J. Immunol., 23: 1456-1461 (1993)) and can be used to make synthetic light chain repertoires. Synthetic V gene repertoires, based on a range of VH and VL folds, and L3 and H3 lengths, will encode antibodies of considerable structural diversity. Following amplification of V-gene encoding DNAs, germline V-gene segments can be rearranged in vitro according to the methods of Hoogenboom and Winter, J. Mol. Biol., 227: 381-388 (1992).

[0307] Repertoires of antibody fragments can be constructed by combining VH and VL gene repertoires together in several ways. Each repertoire can be created in different vectors, and the vectors recombined in vitro, e.g., as described in Hogrefe et al., Gene, 128: 119-126 (1993), or in vivo by combinatorial infection, e.g., the loxP system described in Waterhouse et al., Nucl. Acids Res., 21: 2265-2266 (1993). The in vivo recombination approach exploits the two-chain nature of Fab fragments to overcome the limit on library size imposed by E. coli transformation efficiency. Naive VH and VL repertoires are cloned separately, one into a phagemid and the other into a phage vector. The two libraries are then combined by phage infection of phagemid-containing bacteria so that each cell contains a different combination and the library size is limited only by the number of cells present (about 10¹² clones). Both vectors contain in vivo recombination signals so that the VH and VL genes are recombined onto a single replicon and are co-packaged into phage virions. These huge libraries provide large numbers of diverse antibodies of good affinity (K_{d}⁻¹ of about 10^{-8 M} ).

[0308] Alternatively, the repertoires may be cloned sequentially into the same vector, e.g. as described in Barbas et al., Proc. Natl. Acad. Sci. USA, 88: 7978-7982 (1991), or assembled together by PCR and then cloned, e.g. as described in Clackson et al., Nature, 352: 624-628 (1991). PCR assembly can also be used to join VH and VL DNAs with DNA encoding a flexible peptide spacer to form single chain Fv (scFv) repertoires. In yet another technique, “in cell PCR assembly” is used to combine VH and VL genes within lymphocytes by PCR and then clone repertoires of linked genes as described in Embleton et al., Nucl. Acids Res., 20: 3831-3837 (1992).

[0309] The antibodies produced by naive libraries (either natural or synthetic) can be of moderate affinity (K_{d}⁻¹ of about 10⁶ to 10⁷ M⁻¹), but affinity maturation can also be mimicked in vitro by constructing and reselecting from secondary libraries as described in Winter et al. (1994), supra. For example, mutation can be introduced at random in vitro by using error-prone polymerase (reported in Leung et al., Technique, 1: 11-15 (1989)) in the method of Hawkins et al., J. Mol. Biol., 226: 889-896 (1992) or in the method of Gram et al., Proc. Natl. Acad. Sci. USA, 89: 3576-3580 (1992). Additionally, affinity maturation can be performed by randomly mutating one or more CDRs, e.g. using PCR with primers carrying random sequence spanning the CDR of interest, in selected individual Fv clones and screening for higher affinity clones. WO 9607754 (published 14 Mar. 1996) described a method for inducing mutagenesis in a complementarity determining region of an immunoglobulin light chain to create a library of light chain genes. Another effective approach is to recombine the VH or VL domains selected by phage display with repertoires of naturally occurring V domain variants obtained from unimmunized donors and screen for higher affinity in several rounds of chain reshuffling as described in Marks et al., Biotechnol., 10: 779-783 (1992). This technique allows the production of antibodies and antibody fragments with affinities in the 10⁻⁹ M range.

[0310] Notch1 nucleic acid and amino acid sequences are known in the art. A representative nucleic acid and amino acid sequence of Notch1 is detailed in SEQ ID NOS. 1 and 2 respectively. Nucleic acid sequence encoding the Notch1 can be designed using the amino acid sequence of the desired region of Notch1. Alternatively, the cDNA sequence (or fragments thereof) of GenBank Accession Nos. NM₋₀₁₉₀₇₄. Notch1 is a transmembrane protein. The extracellular region contains 36 EGF-like repeats, as well as a DSL domain that is conserved among all Notch ligands and is necessary for receptor binding. The predicted protein also contains a transmembrane region, and a cytoplasmic tail lacking any catalytic motifs. Human Notch1 protein is a 685 amino acid protein. The accession number of human Notch1 is NM₋₋₀₁₉₀₇₄. See Sarah J. Bray, “Notch signaling: a simple pathway becomes complex” Nature Reviews Molecular Cell Biology, 7: 678-689 (2006), the entire content of which is incorporated by reference herein.

[0311] DNAs encoding Notch1 can be prepared by a variety of methods known in the art. These methods include, but are not limited to, chemical synthesis by any of the methods described in Engels et al., Agnew. Chem. Int Ed. Engl., 28: 716-734 (1989), such as the triester, phosphite, phosphoramidite and H-phosphonate methods. In one embodiment, codons preferred by the expression host cell are used in the design of the Notch1 encoding DNA. Alternatively, DNA encoding the Notch1 can be isolated from a genomic or cDNA library.

[0312] Following construction of the DNA molecule encoding the Notch1, the DNA molecule is operably linked to an expression control sequence in an expression vector, such as a plasmid, wherein the control sequence is recognized by a host cell transformed with the vector. In general, plasmid vectors contain replication and control sequences which are derived from species compatible with the host cell. The vector ordinarily carries a replication site, as well as sequences which encode proteins that are capable of providing phenotypic selection in transformed cells. Suitable vectors for expression in prokaryotic and eukaryotic host cells are known in the art and some are further described herein. Eukaryotic organisms, such as yeasts, or cells derived from multicellular organisms, such as mammals, may be used.

[0313] Optionally, the DNA encoding the Notch1 is operably linked to a secretory leader sequence resulting in secretion of the expression product by the host cell into the culture medium. Examples of secretory leader sequences include stII, ecotin, lamB, herpes GD, lpp, alkaline phosphatase, invertase, and alpha factor. Also suitable for use herein is the 36 amino acid leader sequence of protein A (Abrahmsen et al., EMBO J., 4: 3901 (1985)).

[0314] Host cells are transfected and preferably transformed with the above-described expression or cloning vectors of this invention and cultured in conventional nutrient media modified as appropriate for inducing promoters, selecting transformants, or amplifying the genes encoding the desired sequences.

[0315] Transfection refers to the taking up of an expression vector by a host cell whether or not any coding sequences are in fact expressed. Numerous methods of transfection are known to the ordinarily skilled artisan, for example, CaPO₄ precipitation and electroporation. Successful transfection is generally recognized when any indication of the operation of this vector occurs within the host cell. Methods for transfection are well known in the art, and some are further described herein.

[0316] Transformation means introducing DNA into an organism so that the DNA is replicable, either as an extrachromosomal element or by chromosomal integrant. Depending on the host cell used, transformation is done using standard techniques appropriate to such cells. Methods for transformation are well known in the art, and some are further described herein.

[0317] Prokaryotic host cells used to produce the Notch1 can be cultured as described generally in Sambrook et al., supra.

[0318] The mammalian host cells used to produce the Notch1 can be cultured in a variety of media, which is well known in the art and some of which is described herein.

[0319] The host cells referred to in this disclosure encompass cells in in vitro culture as well as cells that are within a host animal.

[0320] Purification of Notch1 may be accomplished using art-recognized methods, some of which are described herein.

[0321] The purified Notch1 can be attached to a suitable matrix such as agarose beads, acrylamide beads, glass beads, cellulose, various acrylic copolymers, hydroxyl methacrylate gels, polyacrylic and polymethacrylic copolymers, nylon, neutral and ionic carriers, and the like, for use in the affinity chromatographic separation of phage display clones. Attachment of the Notch1 protein to the matrix can be accomplished by the methods described in Methods in Enzymology, vol. 44 (1976). A commonly employed technique for attaching protein ligands to polysaccharide matrices, e.g. agarose, dextran or cellulose, involves activation of the carrier with cyanogen halides and subsequent coupling of the peptide ligand's primary aliphatic or aromatic amines to the activated matrix.

[0322] Alternatively, Notch1 can be used to coat the wells of adsorption plates, expressed on host cells affixed to adsorption plates or used in cell sorting, or conjugated to biotin for capture with streptavidin-coated beads, or used in any other art-known method for panning phage display libraries.

[0323] The phage library samples are contacted with immobilized Notch1 under conditions suitable for binding of at least a portion of the phage particles with the adsorbent. Normally, the conditions, including pH, ionic strength, temperature and the like are selected to mimic physiological conditions. The phages bound to the solid phase are washed and then eluted by acid, e.g. as described in Barbas et al., Proc. Natl. Acad. Sci. USA, 88: 7978-7982 (1991), or by alkali, e.g. as described in Marks et al., J. Mol. Biol., 222: 581-597 (1991), or by Notch1 antigen competition, e.g. in a procedure similar to the antigen competition method of Clackson et al., Nature, 352: 624-628 (1991). Phages can be enriched 20-1,000-fold in a single round of selection. Moreover, the enriched phages can be grown in bacterial culture and subjected to further rounds of selection.

[0324] The efficiency of selection depends on many factors, including the kinetics of dissociation during washing, and whether multiple antibody fragments on a single phage can simultaneously engage with antigen. Antibodies with fast dissociation kinetics (and weak binding affinities) can be retained by use of short washes, multivalent phage display and high coating density of antigen in solid phase. The high density not only stabilizes the phage through multivalent interactions, but favors rebinding of phage that has dissociated. The selection of antibodies with slow dissociation kinetics (and good binding affinities) can be promoted by use of long washes and monovalent phage display as described in Bass et al., Proteins, 8: 309-314 (1990) and in WO 92/09690, and a low coating density of antigen as described in Marks et al., Biotechnol., 10: 779-783 (1992).

[0325] It is possible to select between phage antibodies of different affinities, even with affinities that differ slightly, for Notch1. However, random mutation of a selected antibody (e.g. as performed in some of the affinity maturation techniques described above) is likely to give rise to many mutants, most binding to antigen, and a few with higher affinity. With limiting Notch1, rare high affinity phage could be competed out. To retain all the higher affinity mutants, phages can be incubated with excess biotinylated Notch1, but with the biotinylated Notch1 at a concentration of lower molarity than the target molar affinity constant for Notch1. The high affinity-binding phages can then be captured by streptavidin-coated paramagnetic beads. Such “equilibrium capture” allows the antibodies to be selected according to their affinities of binding, with sensitivity that permits isolation of mutant clones with as little as two-fold higher affinity from a great excess of phages with lower affinity. Conditions used in washing phages bound to a solid phase can also be manipulated to discriminate on the basis of dissociation kinetics.

[0326] Anti-Notch1 clones may be activity selected. In one embodiment, the invention provides anti-Notch1 antibodies that block the binding between a Notch receptor (such as Notch1, Notch2, Notch3 and/or Notch4), preferably one of a Notch1 and/or Notch3 receptor and its binding partner. Fv clones corresponding to such anti-Notch1 antibodies can be selected by (1) isolating anti-Notch1 clones from a phage library as described above, and optionally amplifying the isolated population of phage clones by growing up the population in a suitable bacterial host; (2) selecting Notch1 and a second protein against which blocking and non-blocking activity, respectively, is desired; (3) adsorbing the anti-Notch1 phage clones to immobilized Notch1; (4) using an excess of the second protein to elute any undesired clones that recognize Notch1-binding determinants which overlap or are shared with the binding determinants of the second protein; and (5) eluting the clones which remain adsorbed following step (4). Optionally, clones with the desired blocking/non-blocking properties can be further enriched by repeating the selection procedures described herein one or more times.

[0327] DNA encoding, for example, phage display Fv clones of the invention is readily isolated and sequenced using conventional procedures (e.g. by using oligonucleotide primers designed to specifically amplify the heavy and light chain coding regions of interest from hybridoma or phage DNA template). Once isolated, the DNA can be placed into expression vectors, which are then transfected into host cells such as E. coli cells, simian COS cells, Chinese hamster ovary (CHO) cells, or myeloma cells that do not otherwise produce immunoglobulin protein, to obtain the synthesis of the desired monoclonal antibodies in the recombinant host cells. Review articles on recombinant expression in bacteria of antibody-encoding DNA include Skerra et al., Curr. Opinion in Immunol., 5: 256 (1993) and Pluckthun, Immunol. Revs, 130: 151 (1992).

[0328] DNA encoding the Fv clones of the invention can be combined with known DNA sequences encoding heavy chain and/or light chain constant regions (e.g. the appropriate DNA sequences can be obtained from Kabat et al., supra) to form clones encoding full or partial length heavy and/or light chains. It will be appreciated that constant regions of any isotype can be used for this purpose, including IgG, IgM, IgA, IgD, and IgE constant regions, and that such constant regions can be obtained from any human or animal species. A Fv clone derived from the variable domain DNA of one animal (such as human) species and then fused to constant region DNA of another animal species to form coding sequence(s) for “hybrid”, full length heavy chain and/or light chain is included in the definition of “chimeric” and “hybrid” antibody as used herein. In a preferred embodiment, a Fv clone derived from human variable DNA is fused to human constant region DNA to form coding sequence(s) for all human, full or partial length heavy and/or light chains.

### Antibody Fragments

[0329] In certain circumstances there are advantages of using antibody fragments, rather than whole antibodies. The smaller size of the fragments allows for rapid clearance, and may lead to improved access to solid tumors.

[0330] An antibody functional fragment refers to a portion of an antibody which retains some or all of its target-specific binding activity. Such functional fragments can include, for example, antibody functional fragments such as Fv, Fab, F(ab′), F(ab)₂, F(ab′)₂, single chain Fv (scFv), diabodies, triabodies, tetrabodies and minibody. Other functional fragments can include, for example, heavy (H) or light (L) chain polypeptides, variable heavy (V_{H}) and variable light (V_{L}) chain region polypeptides, complementarity determining region (CDR) polypeptides, single domain antibodies, and polypeptides that contain at least a portion of an immunoglobulin that is sufficient to retain target-specific binding activity. The present invention encompasses antibody fragments. In certain circumstances there are advantages of using antibody fragments, rather than whole antibodies. The smaller size of the fragments allows for rapid clearance, and may lead to improved access to solid tumors.

[0331] Various techniques have been developed for the production of antibody fragments. Traditionally, these fragments were derived via proteolytic digestion of intact antibodies (see, e.g., Morimoto et al., Journal of Biochemical and Biophysical Methods 24:107-117 (1992); and Brennan et al., Science, 229:81 (1985)). However, these fragments can now be produced directly by recombinant host cells. Fab, Fv and ScFv antibody fragments can all be expressed in and secreted from E. coli, thus allowing the facile production of large amounts of these fragments. Antibody fragments can be isolated from the antibody phage libraries discussed above. Alternatively, Fab′-SH fragments can be directly recovered from E. coli and chemically coupled to form F(ab′)₂ fragments (Carter et al., Bio/Technology 10: 163-167 (1992)). According to another approach, F(ab′)₂ fragments can be isolated directly from recombinant host cell culture. Fab and F(ab′)₂ fragment with increased in vivo half-life comprising a salvage receptor binding epitope residues are described in U.S. Pat. No. 5,869,046. Other techniques for the production of antibody fragments will be apparent to the skilled practitioner. In other embodiments, the antibody of choice is a single chain Fv fragment (scFv). See WO 93/16185; U.S. Pat. Nos. 5,571,894; and 5,587,458. Fv and sFv are the only species with intact combining sites that are devoid of constant regions; thus, they are suitable for reduced nonspecific binding during in vivo use. sFv fusion proteins may be constructed to yield fusion of an effector protein at either the amino or the carboxy terminus of an sFv. See Antibody Engineering, ed. Borrebaeck, supra. The antibody fragment may also be a “linear antibody”, e.g., as described in U.S. Pat. No. 5,641,870 for example. Such linear antibody fragments may be monospecific or bispecific.

[0332] With respect to antibodies and functional fragments thereof that exhibit beneficial binding characteristics to a target molecule, various forms, alterations and modifications are well known in the art. Target-specific monoclonal antibodies for use in a biopharmaceutical formulation of the invention can include any of such various monoclonal antibody forms, alterations and modifications. Examples of such various forms and terms as they are known in the art are set forth below.

### Polyclonal Antibodies

[0333] Polyclonal antibodies are preferably raised in animals by multiple subcutaneous (sc) or intraperitoneal (ip) injections of the relevant antigen and an adjuvant. It may be useful to conjugate the relevant antigen (especially when synthetic peptides are used) to a protein that is immunogenic in the species to be immunized. For example, the antigen can be conjugated to keyhole limpet hemocyanin (KLH), serum albumin, bovine thyroglobutin, or soybean trypsin inhibitor, using a bifunctional or derivatizing agent, e.g., maleimidobenzoyl sulfosuccinimide ester (conjugation through cysteine residues). N-hydroxysuccinimide (through lysine residues), glutaraldehyde, succinic anhydride, SOCl₂, or R¹N═C═NR, where R and R¹ are different alkyl groups.

[0334] Animals are immunized against the antigen, immunogenic conjugates, or derivatives by combining, e.g., 100 μg or 5 μg of the protein or conjugate (for rabbits or mice, respectively) with 3 volumes of Freund's complete adjuvant and injecting the solution intradermally at multiple sites. One month later, the animals are boosted with ⅕ to 1/10 the original amount of peptide or conjugate in Freund's complete adjuvant by subcutaneous injection at multiple sites. Seven to 14 days later, the animals are bled and the serum is assayed for antibody titer. Animals are boosted until the titer plateaus. Conjugates also can be made in recombinant cell culture as protein fusions. Also, aggregating agents such as alum are suitably used to enhance the immune response.

### Monoclonal Antibodies

[0335] Monoclonal antibodies may be made using the hybridoma method first described by Kohler et al., Nature, 256:495 (1975), or may be made by recombinant DNA methods (U.S. Pat. No. 4,816,567).

[0336] In the hybridoma method, a mouse or other appropriate host animal, such as a hamster, is immunized as described above to elicit lymphocytes that produce or are capable of producing antibodies that will specifically bind to the protein used for immunization. Alternatively, lymphocytes may be immunized in vitro. After immunization, lymphocytes are isolated and then fused with a myeloma cell line using a suitable fusing agent, such as polyethylene glycol, to form a hybridoma cell (Goding, Monoclonal Antibodies: Principles and Practice, pp. 59-103 (Academic Press, 1986)).

[0337] The hybridoma cells thus prepared are seeded and grown in a suitable culture medium which medium preferably contains one or more substances that inhibit the growth or survival of the unfused, parental myeloma cells (also referred to as fusion partner). For example, if the parental myeloma cells lack the enzyme hypoxanthine guanine phosphoribosyl transferase (HGPRT or HPRT), the selective culture medium for the hybridomas typically will include hypoxanthine, aminopterin, and thymidine (HAT medium), which substances prevent the growth of HGPRT-deficient cells.

[0338] Preferred fusion partner myeloma cells are those that fuse efficiently, support stable high-level production of antibody by the selected antibody-producing cells, and are sensitive to a selective medium that selects against the unfused parental cells. Preferred myeloma cell lines are murine myeloma lines, such as those derived from MOPC-21 and MPC-11 mouse tumors available from the Salk Institute Cell Distribution Center, San Diego, Calif. USA, and SP-2 and derivatives e.g., X63-Ag8-653 cells available from the American Type Culture Collection, Rockville, Md. USA. Human myeloma and mouse-human heteromyeloma cell lines also have been described for the production of human monoclonal antibodies (Kozbor, J. Immunol., 133:3001 (1984); and Brodeur et al., Monoclonal Antibody Production Techniques and Applications, pp. 51-63 (Marcel Dekker, Inc., New York, 1987)).

[0339] Culture medium in which hybridoma cells are growing is assayed for production of monoclonal antibodies directed against the antigen. Preferably, the binding specificity of monoclonal antibodies produced by hybridoma cells is determined by immunoprecipitation or by an in vitro binding assay, such as radioimmunoassay (RIA) or enzyme-linked immunosorbent assay (ELISA).

[0340] The binding affinity of the monoclonal antibody can, for example, be determined by the Scatchard analysis described in Munson et al., Anal, Biochem., 107:220 (1980).

[0341] Once hybridoma cells that produce antibodies of the desired specificity, affinity, and/or activity are identified, the clones may be subcloned by limiting dilution procedures and grown by standard methods (Goding, Monoclonal Antibodies: Principles and Practice, pp. 59-103 (Academic Press, 1986)). Suitable culture media for this purpose include, for example, D-MEM or RPMI-1640 medium. In addition, the hybridoma cells may be grown in vivo as ascites tumors in an animal e.g, by i.p. injection of the cells into mice.

[0342] The monoclonal antibodies secreted by the subclones are suitably separated from the culture medium, ascites fluid, or serum by conventional antibody purification procedures such as, for example, affinity chromatography (e. g., using protein A or protein G-Sepharose®) or ion-exchange chromatography, hydroxylapatite chromatography, gel electrophoresis, dialysis, etc.

[0343] DNA encoding the monoclonal antibodies is readily isolated and sequenced using conventional procedures (e.g., by using oligonucleotide probes that are capable of binding specifically to genes encoding the heavy and light chains of murine antibodies). The hybridoma cells serve as a preferred source of such DNA. Once isolated, the DNA may be placed into expression vectors, which are then transfected into host cells such as E. coli cells, simian COS cells, Chinese Hamster Ovary (CHO) cells, or myeloma cells that do not otherwise produce antibody protein, to obtain the synthesis of monoclonal antibodies in the recombinant host cells. Review articles on recombinant expression in bacteria of DNA encoding the antibody include Skerra et al., Curr. Opinion in Immunol., 5:256-262 (1993) and Pluckthun, Immunol. Revs., 130:151-188 (1992).

[0344] In a further embodiment, monoclonal antibodies or antibody fragments can be isolated from antibody phage libraries generated using the techniques described in McCafferty et al., Nature, 348:552-554 (1990). Clackson et al., Nature, 352:624-628 (1991) and Marks et al., J. Mol. Biol., 222:581-597 (1991) describe the isolation of murine and human antibodies, respectively, using phage libraries. Subsequent publications describe the production of high affinity (nM range) human antibodies by chain shuffling (Marks et al., Bio/Technology, 10:779-783 (1992)), as well as combinatorial infection and in vivo recombination as a strategy for constructing very large phage libraries (Waterhouse et al., Nuc. Acids. Res., 21:2265-2266 (1993)). Thus, these techniques are viable alternatives to traditional monoclonal antibody hybridoma techniques for isolation of monoclonal antibodies.

[0345] The DNA that encodes the antibody may be modified, for example, by substituting human heavy chain and light chain constant domain (C_{H} and C_{L}) sequences for the homologous murine sequences (U.S. Pat. No. 4,816,567; and Morrison, et al., Proc. Natl Acad. Sci. USA, 81:6851 (1984)), or by fusing the immunoglobulin coding sequence with all or part of the coding sequence for a non-immunoglobulin polypeptide. The non-immunoglobulin polypeptide sequences can substitute for the constant domains of an antibody, or they are substituted for the variable domains of one antigen-combining site of an antibody to create a chimeric bivalent antibody comprising one antigen-combining site having specificity for an antigen and another antigen-combining site having specificity for a different antigen.

### Human Antibodies

[0346] Human anti-Notch1 antibodies of the invention can be constructed by combining Fv clone variable domain sequence(s) selected from human-derived phage display libraries with known human constant domain sequences(s) as described above. Alternatively, human monoclonal anti-Notch1 antibodies of the invention can be made by the hybridoma method. Human myeloma and mouse-human heteromyeloma cell lines for the production of human monoclonal antibodies have been described, for example, by Kozbor J. Immuunol., 133: 3001 (1984); Brodeur et al, Monoclonal Antibody Production Techniques and Applications, pp. 51-63 (Marcel Dekker, Inc., New York, 1987); and Boerner et al, J. Immunol., 147: 86 (1991).

[0347] It is now possible to produce transgenic animals (e.g. mice) that are capable, upon immunization, of producing a full repertoire of human antibodies in the absence of endogenous immunoglobulin production. For example, it has been described that the homozygous deletion of the antibody heavy-chain joining region (JH) gene in chimeric and germ-line mutant mice results in complete inhibition of endogenous antibody production. Transfer of the human germ-line immunoglobulin gene array in such germ-line mutant mice will result in the production of human antibodies upon antigen challenge. See, e.g., Jakobovits et al., Proc. Natl. Acad. Sci. USA, 90: 2551 (1993); Jakobovits et al, Nature, 362: 255 (1993); Bruggermann et al, Year in Immunol., 7: 33 (1993); U.S. Pat. Nos. 5,545,806, 5,569,825, 5,591,669 (all of GenPharm); 5,545,807; and WO 97/17852.

[0348] Alternatively, phage display technology (McCafferty et al., Nature 348:552-553 (1990) can be used to produce human antibodies and antibody fragments in vitro, from immunoglobulin variable (V) domain gene repertoires from unimmunized donors. According to this technique, antibody V domain genes are cloned in-frame into either a major or minor coat protein gene of a filamentous bacteriophage, such as M13 or fd, and displayed as functional antibody fragments on the surface of the phage particle. Because the filamentous particle contains a single-stranded DNA copy of the phage genome, selections based on the functional properties of the antibody also result in selection of the gene encoding the antibody exhibiting those properties. Thus, the phage mimics some of the properties of the B-cell. Phage display can be performed in a variety of formats, reviewed in, e.g., Johnson, Kevin S. and Chiswell, David J., Current Opinion in Structural Biology 3:564-571 (1993). Several sources of V-gene segments can be used for phage display. Clackson et al., Nature, 352:624-628 (1991) isolated a diverse array of anti-oxazolone antibodies from a small random combinatorial library of V genes derived from the spleens of immunized mice. A repertoire of V genes from unimmunized human donors can be constructed and antibodies to a diverse array of antigens (including self-antigens) can be isolated essentially following the techniques described by Marks et al., J. Mol. Biol. 222:581-597 (1991), or Griffith et al., EMBO J. 12:725-734 (1993). See, also, U.S. Pat. Nos. 5,565,332 and 5,573,905.

[0349] Human antibodies may also be generated by in vitro activated B cells (see U.S. Pat. Nos. 5,567,610 and 5,229,275).

[0350] Gene shuffling can also be used to derive human antibodies from non-human, e.g. rodent, antibodies, where the human antibody has similar affinities and specificities to the starting non-human antibody. According to this method, which is also called “epitope imprinting”, either the heavy or light chain variable region of a non-human antibody fragment obtained by phage display techniques as described above is replaced with a repertoire of human V domain genes, creating a population of non-human chain/human chain scFv or Fab chimeras. Selection with antigen results in isolation of a non-human chain/human chain chimeric scFv or Fab wherein the human chain restores the antigen binding site destroyed upon removal of the corresponding non-human chain in the primary phage display clone, i.e. the epitope governs (imprints) the choice of the human chain partner. When the process is repeated in order to replace the remaining non-human chain, a human antibody is obtained (see PCT WO 93/06213 published Apr. 1, 1993). Unlike traditional humanization of non-human antibodies by CDR grafting, this technique provides completely human antibodies, which have no FR or CDR residues of non-human origin.

### Bispecific Antibodies

[0351] Bispecific antibodies are monoclonal antibodies that have binding specificities for at least two different antigens. In the present case, one of the binding specificities is for Notch1 and the other is for any other antigen. Exemplary bispecific antibodies may bind to two different epitopes of the Notch1 protein. Bispecific antibodies may also be used to localize cytotoxic agents to cells which express Notch1. These antibodies possess a Notch1-binding arm and an arm which binds the cytotoxic agent (e.g. saporin, anti-interferon-α, vinca alkaloid, ricin A chain, methotrexate or radioactive isotope hapten). Bispecific antibodies can be prepared as full length antibodies or antibody fragments (e.g. F(ab′)₂ bispecific antibodies).

[0352] Methods for making bispecific antibodies are known in the art. Traditionally, the recombinant production of bispecific antibodies is based on the co-expression of two immunoglobulin heavy chain-light chain pairs, where the two heavy chains have different specificities (Milstein and Cuello, Nature, 305: 537 (1983)). Because of the random assortment of immunoglobulin heavy and light chains, these hybridomas (quadromas) produce a potential mixture of 10 different antibody molecules, of which only one has the correct bispecific structure. The purification of the correct molecule, which is usually done by affinity chromatography steps, is rather cumbersome, and the product yields are low. Similar procedures are disclosed in WO 93/08829 published May 13, 1993, and in Traunecker et al., EMBO J., 10: 3655 (1991).

[0353] According to a different and more preferred approach, antibody variable domains with the desired binding specificities (antibody-antigen combining sites) are fused to immunoglobulin constant domain sequences. The fusion preferably is with an immunoglobulin heavy chain constant domain, comprising at least part of the hinge, CH2, and CH3 regions. It is preferred to have the first heavy-chain constant region (CH1), containing the site necessary for light chain binding, present in at least one of the fusions. DNAs encoding the immunoglobulin heavy chain fusions and, if desired, the immunoglobulin light chain, are inserted into separate expression vectors and are co-transfected into a suitable host organism. This provides for great flexibility in adjusting the mutual proportions of the three polypeptide fragments in embodiments when unequal ratios of the three polypeptide chains used in the construction provide the optimum yields. It is, however, possible to insert the coding sequences for two or all three polypeptide chains in one expression vector when the expression of at least two polypeptide chains in equal ratios results in high yields or when the ratios are of no particular significance.

[0354] In one embodiment of this approach, the bispecific antibodies are composed of a hybrid immunoglobulin heavy chain with a first binding specificity in one arm, and a hybrid immunoglobulin heavy chain-light chain pair (providing a second binding specificity) in the other arm. It was found that this asymmetric structure facilitates the separation of the desired bispecific compound from unwanted immunoglobulin chain combinations, as the presence of an immunoglobulin light chain in only one half of the bispecific molecule provides for a facile way of separation. This approach is disclosed in WO 94/04690. For further details of generating bispecific antibodies see, for example, Suresh et al., Methods in Enzymology, 121:210 (1986).

[0355] According to another approach, the interface between a pair of antibody molecules can be engineered to maximize the percentage of heterodimers which are recovered from recombinant cell culture. The preferred interface comprises at least a part of the C_{H3} domain of an antibody constant domain. In this method, one or more small amino acid side chains from the interface of the first antibody molecule are replaced with larger side chains (e.g. tyrosine or tryptophan). Compensatory “cavities” of identical or similar size to the large side chain(s) are created on the interface of the second antibody molecule by replacing large amino acid side chains with smaller ones (e.g. alanine or threonine). This provides a mechanism for increasing the yield of the heterodimer over other unwanted end-products such as homodimers.

[0356] Techniques for generating bispecific antibodies from antibody fragments have also been described in the literature. For example, bispecific antibodies can be prepared using chemical linkage. Brennan et al., Science, 229: 81 (1985) describe a procedure wherein intact antibodies are proteolytically cleaved to generate F(ab′)₂ fragments. These fragments are reduced in the presence of the dithiol complexing agent sodium arsenite to stabilize vicinal dithiols and prevent intermolecular disulfide formation. The Fab′ fragments generated are then converted to thionitrobenzoate (TNB) derivatives. One of the Fab′-TNB derivatives is then reconverted to the Fab′-thiol by reduction with mercaptoethylamine and is mixed with an equimolar amount of the other Fab′-TNB derivative to form the bispecific antibody. The bispecific antibodies produced can be used as agents for the selective immobilization of enzymes.

[0357] Various techniques for making and isolating bispecific antibody fragments directly from recombinant cell culture have also been described. For example, bispecific antibodies have been produced using leucine zippers. See Kostelny et al., J. Immunol., 148(5):1547-1553 (1992). The leucine zipper peptides from the Fos and Jun proteins were linked to the Fab′ portions of two different antibodies by gene fusion. The antibody homodimers were reduced at the hinge region to form monomers and then re-oxidized to form the antibody heterodimers. This method can also be utilized for the production of antibody homodimers. Another strategy for making bispecific antibody fragments by the use of single-chain Fv (scFv) dimers has also been reported. See Gruber et al., J. Immunol., 152:5368 (1994).

### Heteroconjugate

[0358] Bispecific antibodies include cross-linked or “heteroconjugate” antibodies. As such, heteroconjugate antibodies are also within the scope of the present invention. Heteroconjugate antibodies are composed of two covalently joined antibodies. Such antibodies have, for example, been proposed to target immune system cells to unwanted cells, e.g., U.S. Pat. No. 4,676,980, and for treatment of HIV infection, e.g., WO 91/00360; WO 92/200373; EP 03089. Heteroconjugate antibodies may be made using any convenient cross-linking methods. It is contemplated that the antibodies may be prepared in vitro using known methods in synthetic protein chemistry, including those involving cross-linking agents. For example, immunotoxins may be constructed using a disulfide exchange reaction or by forming a thioether bond. Examples of suitable reagents for this purpose include iminothiolate and methyl-4-mercaptobutyrimidate and those disclosed, for example, in U.S. Pat. No. 4,676,980.

### Diabody

[0359] The “diabody” technology described by Hollinger et al., Proc. Natl. Acad. Sci. USA, 90:6444-6448 (1993) has provided an alternative mechanism for making bispecific antibody fragments. A diabody is a bivalent dimer formed by the non-covalent association of two scFvs, yielding two Fv binding sites. Briefly, a diabody refers to an engineered antibody construct prepared by isolating the binding domains (both heavy and light chain) of a binding antibody, and supplying a linking moiety which joins or operably links the heavy and light chains on the same polypeptide chain thereby preserving the binding function (see, Holliger et al. (1993) Proc. Natl. Acad. Sci. USA 90:6444; Poljak (1994) Structure 2:1121-1123). This forms, in essence, a radically abbreviated antibody, having only the variable domain necessary for binding the antigen. By using a linker that is too short to allow pairing between the two domains on the same chain, the domains are forced to pair with the complementary domains of another chain and create two antigen-binding sites. These dimeric antibody fragments, or diabodies, are bivalent and bispecific. Thus, diabodies are dimers of two scFv molecules that cannot fold properly into one scFv molecule. Diabodies are built like scFv molecules, but usually have a short (less than 10, preferably 1-5 amino acids) peptide linker connecting both V-domains, whereby both domains can not interact intramolecular, and are forced to interact intermolecular (Holliger et al., 1993) (U.S. Pat. No. 5,837,242). A diabody thus may consist of a VH-VL chain that interacts with a similar VH-VL chain to form a dimer of the formula VH-VL:VH-VL. The diabody chain dimers bind the antigen specified by VH and VL bivalent. Winter described the construction of bispecific diabodies by coupling the VH domain of a chosen antibody A to the VL domain of a chosen antibody B, using a peptide linker sufficiently short to inhibit the interaction of VH(A) with VL(B). Also the reverse molecule VH(B)-VL(A) is made the same way (Holliger, Griffiths, Hoogenboom, Malmqvist, Marks, McGuinness, Pope, Prospero and Winter: “Multivalent and multispecific binding proteins, their manufacture and use”, U.S. Pat. No. 5,837,242, 1998). The skilled artisan will appreciate that any method to generate diabodies can be used. Suitable methods are described by Holliger, et al. (1993) supra, Poljak (1994) supra, Zhu, et al. (1996) Biotechnology 14:192-196, and U.S. Pat. No. 6,492,123, incorporated herein by reference.

### Fab′-SH

[0360] Recent progress has facilitated the direct recovery of Fab′-SH fragments from E. coli, which can be chemically coupled to form bispecific antibodies. Shalaby et al., J. Exp. Med., 175: 217-225 (1992) describe the production of a fully humanized bispecific antibody F(ab′)₂ molecule. Each Fab′ fragment was separately secreted from E. coli and subjected to directed chemical coupling in vitro to form the bispecific antibody. The bispecific antibody thus formed was able to bind to cells overexpressing the HER2 receptor and normal human T cells, as well as trigger the lytic activity of human cytotoxic lymphocytes against human breast tumor targets.

### Trispecific

[0361] Antibodies with more than two valencies are contemplated. For example, trispecific antibodies can be prepared. Tutt et al. J. Immunol. 147: 60 (1991).

### Tetravalent

[0362] Tetravalent bispecific antibodies can be created by chemical cross-linking of two monoclonal antibodies (Bs(IgG)2) (Karpovsky et al., 1984) (U.S. Pat. No. 4,676,980). Problems related to their rapid clearance in vivo via the kidney due to their small size may be circumvented by, for example, increasing their molecular weight size thereby increasing their serum permanence and product efficacy. (Wu, A. M., Chen, W., Raubitschek, A., Williams, L. E., Neumaier, M., Fischer, R., Hu, S. Z., Odom-Maryon, T., Wong, J. Y. and Shively, J. E.: Tumor localization of anti-CEA single-chain Fvs: improved targeting by non-covalent dimers. Immunotechnology 2 (1996) 21-36).

### Peptibodies

[0363] Peptibodies, which consist of an immunoglobulin constant region domain (Fc) linked to two binding peptides through either the carboxyl- or amino termini of the Fc domain, also are included herein as an antibody functional fragment. Such antibody binding fragments can be found described in, for example, Harlow and Lane, supra; Molec. Biology and Biotechnology: A Comprehensive Desk Reference (Myers, R. A. (ed.), New York: VCH Publisher, Inc.); Huston et al., Cell Biophysics, 22:189-224 (1993); Pluckthun and Skerra, Meth. Enzymol., 178:497-515 (1989) and in Day, E. D., Advanced Immunochemistry, Second Ed., Wiley-Liss, Inc., New York, N.Y. (1990).

### Multivalent Antibodies

[0364] A multivalent antibody may be internalized (and/or catabolized) faster than a bivalent antibody by a cell expressing an antigen to which the antibodies bind. The antibodies of the present invention can be multivalent antibodies (which are other than of the IgM class) with three or more antigen binding sites (e.g. tetravalent antibodies), which can be readily produced by recombinant expression of nucleic acid encoding the polypeptide chains of the antibody. The multivalent antibody can comprise a dimerization domain and three or more antigen binding sites. The preferred dimerization domain comprises (or consists of) an Fc region or a hinge region. In this scenario, the antibody will comprise an Fc region and three or more antigen binding sites amino-terminal to the Fe region. The preferred multivalent antibody herein comprises (or consists of) three to about eight, but preferably four, antigen binding sites. The multivalent antibody comprises at least one polypeptide chain (and preferably two polypeptide chains), wherein the polypeptide chain(s) comprise two or more variable domains. For instance, the polypeptide chain(s) may comprise VD1-(X1)n-VD2-(X2)n-Fc, wherein VD1 is a first variable domain, VD2 is a second variable domain, Fc is one polypeptide chain of an Fc region, X1 and X2 represent an amino acid or polypeptide, and n is 0 or 1. For instance, the polypeptide chain(s) may comprise: VH-CH1-flexible linker-VH-CH1-Fc region chain; or VH-CH1-VH-CH1-Fc region chain. The multivalent antibody herein preferably further comprises at least two (and preferably four) light chain variable domain polypeptides. The multivalent antibody herein may, for instance, comprise from about two to about eight light chain variable domain polypeptides. The light chain variable domain polypeptides contemplated here comprise a light chain variable domain and, optionally, further comprise a CL domain.

### Antibody Variants

[0365] In some embodiments, amino acid sequence modification(s) of the antibodies described herein are contemplated. For example, it may be desirable to improve the binding affinity and/or other biological properties of the antibody. Amino acid sequence variants of the antibody are prepared by introducing appropriate nucleotide changes into the antibody nucleic acid, or by peptide synthesis. Such modifications include, for example, deletions from, and/or insertions into and/or substitutions of, residues within the amino acid sequences of the antibody. Any combination of deletion, insertion, and substitution is made to arrive at the final construct, provided that the final construct possesses the desired characteristics. The amino acid alterations may be introduced in the subject antibody amino acid sequence at the time that sequence is made.

[0366] A useful method for identification of certain residues or regions of the antibody that are preferred locations for mutagenesis is called “alanine scanning mutagenesis” as described by Cunningham and Wells (1989) Science, 244:1081-1085. Here, a residue or group of target residues are identified (e.g., charged residues such as arg, asp, his, lys, and glu) and replaced by a neutral or negatively charged amino acid (most preferably alanine or polyalanine) to affect the interaction of the amino acids with antigen. Those amino acid locations demonstrating functional sensitivity to the substitutions then are refined by introducing further or other variants at, or for, the sites of substitution. Thus, while the site for introducing an amino acid sequence variation is predetermined, the nature of the mutation per se need not be predetermined. For example, to analyze the performance of a mutation at a given site, ala scanning or random mutagenesis is conducted at the target codon or region and the expressed immunoglobulins are screened for the desired activity.

[0367] Amino acid sequence insertions include amino- and/or carboxyl-terminal fusions ranging in length from one residue to polypeptides containing a hundred or more residues, as well as intrasequence insertions of single or multiple amino acid residues. Examples of terminal insertions include an antibody with an N-terminal methionyl residue or the antibody fused to a cytotoxic polypeptide. Other insertional variants of the antibody molecule include the fusion of the N- or C-terminus of the antibody to an enzyme (e.g. for ADEPT) or a polypeptide which increases the serum half-life of the antibody.

[0368] Glycosylation of polypeptides is typically either N-linked or O-linked. N-linked refers to the attachment of the carbohydrate moiety to the side chain of an asparagine residue. The tripeptide sequences asparagine-X-serine and asparagine-X-threonine, where X is any amino acid except proline, are the recognition sequences for enzymatic attachment of the carbohydrate moiety to the asparagine side chain. Thus, the presence of either of these tripeptide sequences in a polypeptide creates a potential glycosylation site. O-linked glycosylation refers to the attachment of one of the sugars N-acetylgalactosamine, galactose, or xylose to a hydroxyamino acid, most commonly serine or threonine, although 5-hydroxyproline or 5-hydroxylysine may also be used. Addition of glycosylation sites to the antibody is conveniently accomplished by altering the amino acid sequence such that it contains one or more of the above-described tripeptide sequences (for N-linked glycosylation sites). The alteration may also be made by the addition of, or substitution by, one or more serine or threonine residues to the sequence of the original antibody (for O-linked glycosylation sites). See section marked “Effector Function Engineering”, infra.

[0369] Where the antibody comprises an Fc region, the carbohydrate attached thereto may be altered. For example, antibodies with a mature carbohydrate structure that lacks fucose attached to an Fc region of the antibody are described in US Pat Appl No US 2003/0157108 (Presta, L.). See also US 2004/0093621 (Kyowa Hakko Kogyo Co., Ltd). Antibodies with a bisecting N-acetylglucosamine (GlcNAc) in the carbohydrate attached to an Fc region of the antibody are referenced in WO 2003/011878, Jean-Mairet et al. and U.S. Pat. No. 6,602,684, Umana et al. Antibodies with at least one galactose residue in the oligosaccharide attached to an Fc region of the antibody are reported in WO 1997/30087, Patel et al. See, also, WO 1998/58964 (Raju, S.) and WO 1999/22764 (Raju, S.) concerning antibodies with altered carbohydrate attached to the Fc region thereof. See also US 2005/0123546 (Umana et al.) on antigen-binding molecules with modified glycosylation.

[0370] At least one glycosylation variant herein comprises an Fc region, wherein a carbohydrate structure attached to the Fc region lacks fucose. Such variants have improved ADCC function. Optionally, the Fc region further comprises one or more amino acid substitutions therein which further improve ADCC, for example, substitutions at positions 298, 333, and/or 334 of the Fc region (Eu numbering of residues). Examples of publications related to “defucosylated” or “fucose-deficient” antibodies include: US 2003/0157108; WO 2000/61739; WO 2001/29246; US 2003/0115614; US 2002/0164328; US 2004/0093621; US 2004/0132140; US 2004/0110704; US 2004/0110282; US 2004/0109865; WO 2003/085119; WO 2003/084570; WO 2005/035586; WO 2005/035778; WO2005/053742; Okazaki et al. J. Mol. Biol. 336:1239-1249 (2004); Yamane-Ohnuki et al. Biotech. Bioeng. 87: 614 (2004). Examples of cell lines producing defucosylated antibodies include Lec13 CHO cells deficient in protein fucosylation (Ripka et al. Arch. Biochem. Biophys. 249:533-545 (1986); US Pat Appl No US 2003/0157108 A1, Presta, L; and WO 2004/056312 A1, Adams et al., especially at Example 11), and knockout cell lines, such as alpha-1,6-fucosyltransferase gene, FUT8, knockout CHO cells (Yamane-Ohnuki et al. Biotech. Bioeng. 87: 614 (2004)). For further details, see “Effector Function Engineering” infra.

[0371] Another type of variant is an amino acid substitution variant. These variants have at least one amino acid residue in the antibody molecule replaced by a different residue. The sites of greatest interest for substitutional mutagenesis include the hypervariable regions, but FR alterations are also contemplated. Conservative substitutions are shown in Table 1 under the heading of “preferred substitutions”. If such substitutions result in a change in biological activity, then more substantial changes, denominated “exemplary substitutions” in Table 1, or as further described below in reference to amino acid classes, may be introduced and the products screened.

[0372] Exemplary Preferred Residue Substitutions Ala (A) Val; Leu; Ile Val Arg (R) Lys; Gln; Asn Lys Asn (N) Gln; His; Asp, Lys; Arg Gln Asp (D) Glu; Asn Glu Cys (C) Ser; Ala Ser Gln (Q) Asn; Glu Asn Glu (E) Asp; Gln Asp Gly (G) Ala Ala His (H) Asn; Gln; Lys; Arg Arg Ile (I) Leu; Val; Met; Ala; Leu Phe; Norleucine Leu (L) Norleucine; Ile; Val; Ile Met; Ala; Phe Lys (K) Arg; Gln; Asn Arg Met (M) Leu; Phe; Ile Leu Phe (F) Trp; Leu; Val; Ile; Ala; Tyr Tyr Pro (P) Ala Ala Ser (S) Thr Thr Thr (T) Val; Ser Ser Trp (W) Tyr; Phe Tyr Tyr (Y) Trp; Phe; Thr; Ser Phe Val (V) Ile; Leu; Met; Phe; Leu Ala; Norleucine

[0373] Substantial modifications in the biological properties of the antibody are accomplished by selecting substitutions that differ significantly in their effect on maintaining (a) the structure of the polypeptide backbone in the area of the substitution, for example, as a sheet or helical conformation, (b) the charge or hydrophobicity of the molecule at the target site, or (c) the bulk of the side chain. Naturally occurring residues are divided into groups based on common side-chain properties:

[0374] (1) hydrophobic: Norleucine, Met, Ala, Val, Leu, Ile;

[0375] (2) neutral hydrophilic: Cys, Ser, Thr, Asn, Gln;

[0376] (3) acidic: Asp, Glu;

[0377] (4) basic: His, Lys, Arg;

[0378] (5) residues that influence chain orientation: Gly, Pro; and

[0379] (6) aromatic: Trp, Tyr, Phe.

[0380] Non-conservative substitutions will entail exchanging a member of one of these classes for another class.

[0381] One type of substitutional variant involves substituting one or more hypervariable region residues of a parent antibody (e.g. human antibody). Generally, the resulting variant(s) selected for further development will have improved biological properties relative to the parent antibody from which they are generated. A convenient way for generating such substitutional variants involves affinity maturation using phage display. Briefly, several hypervariable region sites (e.g. 6-7 sites) are mutated to generate all possible amino acid substitutions at each site. The antibodies thus generated are displayed from filamentous phage particles as fusions to the gene III product of M13 packaged within each particle. The phage-displayed variants are then screened for their biological activity (e.g. binding affinity) as herein disclosed. In order to identify candidate hypervariable region sites for modification, alanine scanning mutagenesis can be performed to identify hypervariable region residues contributing significantly to antigen binding. Alternatively, or additionally, it may be beneficial to analyze a crystal structure of the antigen-antibody complex to identify contact points between the antibody and antigen. Such contact residues and neighboring residues are candidates for substitution according to the techniques elaborated herein. Once such variants are generated, the panel of variants is subjected to screening as described herein and antibodies with superior properties in one or more relevant assays may be selected for further development.

[0382] Nucleic acid molecules encoding amino acid sequence variants of the antibody are prepared by a variety of methods known in the art. These methods include, but are not limited to, isolation from a natural source (in the case of naturally occurring amino acid sequence variants) or preparation by oligonucleotide-mediated (or site-directed) mutagenesis, PCR mutagenesis, and cassette mutagenesis of an earlier prepared variant or a non-variant version of the antibody.

### Effector Function Engineering

[0383] (A) Anti-Notch1 Antibodies with Variant Fc Regions

[0384] Most immune functions of antibodies depend on their ability to act as flexible adaptor molecules, linking pathogen with appropriate elimination mechanisms. This ‘bridging’ role entails two types of recognition, each involving contributions from particular antibody domains. The first involves highly specific recognition of the antigen target, and is mediated through the amino-terminal variable domains of the two Fab regions of the antibody. The second involves interaction of the constant domains of the Fc region of the molecule with various effector molecules, including complement and, perhaps most importantly, Fc receptors (FcRs) present on phagocytes and other immune cells. The dual recognition of target and FcR by immunoglobulin molecules has a key role in eliciting effector mechanisms to rid the body of bacteria, viruses, and parasites.

[0385] Briefly, therapeutic antibodies can exert potent biological functions through two major non-exclusive mechanisms: (i) they can block interactions between receptors and their ligands due to the exquisite epitope specificity of their variable domains (“neutralizing/antagonist antibodies”) or trigger potent biological responses such as apoptosis or cell proliferation once they are bound to surface molecules (“agonist antibodies”); (ii) induce effector functions against pathogens and tumor cells following their interactions with the complement component C1q and/or with receptors for Fc region (FcγR). See Cragg et al., Curr Opin Immunol 11:541-547 (1999); Glennie et al., Immunol Today 21:403-410 (2000).

[0386] The effector functions of immunoglobulins e.g., IgG, which is the most common immunoglobulin, are mediated by the antibody Fc region through two major mechanisms: (1) binding to the cell surface Fc receptors (FcγRs) can lead to ingestion of pathogens by phagocytosis or lysis by killer cells via the antibody-dependent cellular cytotoxicity (ADCC) pathway, or (2) binding to the C1q part of the first complement component C1 initiates the complement-dependent cytotoxicity (CDC) pathway, resulting in the lysis of pathogens. Reviewed in Daeron, Annu Rev. Immunol. 15:203-234 (1997); Ward and Ghetie, Therapeutic Immunol. 2:77-94 (1995); Ravetch and Kinet, Annu Rev. Immunol. 9:457-492 (1991). Uananue and Benacerraf, Textbook of Immunology, 2nd Edition, Williams & Wilkins, p. 218 (1984)). There are three known FcγRs, designated FcγRI (CD64), FcγRII (CD32), and FcγRIII (CD16). Anti-tumor efficacy can be due to a combination of these mechanisms, and their relative importance in clinical therapy appears to be cancer dependent. Notwithstanding this arsenal of anti-tumor weapons, the potency of antibodies as anti-cancer agents is unsatisfactory, particularly given their high cost. Currently for anti-cancer therapy, any small improvement in mortality rate defines success.

[0387] Thus, it may be desirable to introduce one or more amino acid modifications in an Fc region of the immunoglobulin polypeptides of the invention, thereby generating an Fc region variant. The Fc region variant may comprise a human Fc region sequence (e.g., a human IgG1, IgG2, IgG3 or IgG4 Fc region) comprising an amino acid modification (e.g. a substitution) at one or more amino acid positions including that of a hinge cysteine.

[0388] ADCC involves the recognition of the antibody by immune cells that engage the antibody-marked cells and either through their direct action, or through the recruitment of other cell types, leads to the tagged-cell's death. CDC is a process where a cascade of different complement proteins become activated, usually when several IgGs are in close proximity to each other, either with one direct outcome being cell lysis, or one indirect outcome being attracting other immune cells to this location for effector cell function.

[0389] A promising means for enhancing the anti-tumor potency of antibodies is via enhancement of their ability to mediate cytotoxic effector functions such as ADCC, ADCP, and CDC. The importance of ADCC as a cytotoxic mechanism of anti-tumor mAbs has been demonstrated in animal studies. Ravetch et al., Annu Rev. Immunol. 16:421-432 (1998) showed that the tumoricidal effect of a humanized anti-HER2/neu mAb (epithelial growth factor receptor 2; Trastuzumab) was significantly reduced in FcγR knockout nude mice as compared to wild-type nude mice. Similarly, the tumor regression activity of a chimeric anti-CD20 mAb (Rituximab) was significantly reduced in FcγR deficient mice as compared to wild-type mice. Ravetch, supra; Clynes et al., Inhibitory Fc receptors modulate in vivo cytoxicity against tumor targets. Nat. Med. 6:443-446 (2000). Further support for an important role for ADCC was provided by a study of Cartron et al., who found that in patients with a polymorphism in FcγRIIIa leading to increased binding of IgG1, therapy with an anti-CD20 mAb produced a 90% response rate (patients with complete remission or partial response) at 12 months, compared to a 51% response rate in individuals not expressing this polymorphism of FcγRIIIa. Cartron et al., Therapeutic activity of humanized anti-CD20 monoclonal antibody and polymorphism in IgG Fc receptor FcγRIIIa gene, Blood 99:754-758 (2002). Others have shown that this FcγRIIIa polymorphism and also a polymorphism in FcγRIIa are associated with the response rate to therapeutic mAbs. W. K. Weng and R. Levy, Two immunoglobulin G fragment C receptor polymorphisms independently predict response to rituximab in patients with follicular lymphoma. J. Clin. Oncol. 21:3940-3947 (2003). The importance of FcγR-mediated effector functions for the anti-cancer activity of antibodies has also been demonstrated in mice (Clynes et al., 1998, Proc Natl Acad Sci USA 95:652-656; Clynes et al., 2000, Nat Med 6:443-446), and the affinity of interaction between Fc and certain FcγRs correlates with targeted cytotoxicity in cell-based assays (Shields et al., 2001, J Biol Chem 276:6591-6604; Presta et al., 2002, Biochem Soc Trans 30:487-490; Shields et al., 2002, J Biol Chem 277:26733-26740). Additionally, a correlation has been observed between clinical efficacy in humans and their allotype of high (V158) or low (F158) affinity polymorphic forms of FcγRIIIa (Cartron et al., 2002, Blood 99:754-758). Together these data suggest that an antibody that is optimized for binding to certain FcγRs may better mediate effector functions and thereby destroy cancer cells more effectively in patients. The balance between activating and inhibiting receptors is an important consideration, and optimal effector function may result from an antibody that has enhanced affinity for activation receptors, for example FcγRI, FcγRIIa/c, and FcγRIIIa, yet reduced affinity for the inhibitory receptor FcγRIIb. Furthermore, because FcγRs can mediate antigen uptake and processing by antigen presenting cells, enhanced FcγR affinity may also improve the capacity of antibody therapeutics to elicit an adaptive immune response. Fc variants have been successfully engineered with selectively enhanced binding to FcγRs, and furthermore these Fc variants provide enhanced potency and efficacy in cell-based effector function assays. See for example U.S. Ser. No. 10/672,280, U.S. Ser. No. 10/822,231, entitled “Optimized Fc Variants and Methods for their Generation”, U.S. Ser. No. 60/627,774, entitled “Optimized Fc Variants”, and U.S. Ser. No. 60/642,477, entitled “Improved Fc Variants”, and references cited therein. U.S. Pat. No. 7,276,585 Xencor, Inc. (Monrovia, Calif.) See also U.S. Pat. No. 6,821,505.

[0390] Most mAbs that mediate antibody-dependent cellular cytotoxicity (ADCC) also activate the complement system 1. A. Gorter and S. Meri, “Immune evasion of tumor cells using membrane-bound complement regulatory proteins.” Immunol. Today, pp. 576-582 (1999).

[0391] Complement initiates three mechanisms that can be used against mAb-coated tumor cells. The first is direct complement killing of tumor cells by the membrane attack complex (MAC), a process usually called ‘complement-dependent cytotoxicity’ (CDC). The second mechanism is complement receptor-dependent enhancement of ADCC. In this case, CR3 binds to iC3b, thus enhancing FcγR-mediated effector cell binding. A third mechanism used for killing microorganisms, CR3-dependent cellular cytotoxicity (CR3-DCC), is usually not activated with tumors.

[0392] Based upon the results of chemical modifications and crystallographic studies, Burton et al. (Nature, 288:338-344 (1980)) proposed that the binding site for the complement subcomponent C1q on IgG involves the last two (C-terminal) β-strands of the CH2 domain. Burton later suggested (Molec. Immunol., 22(3):161-206 (1985)) that the region comprising amino acid residues 318 to 337 might be involved in complement fixation.

[0393] Duncan and Winter (Nature 332:738-40 (1988)), using site directed mutagenesis, reported that Glu318, Lys320 and Lys322 form the binding site to C1q. The data of Duncan and Winter were generated by testing the binding of a mouse IgG2b isotype to guinea pig C1q. The role of Glu318, Lys320 and Lys322 residues in the binding of C1q was confirmed by the ability of a short synthetic peptide containing these residues to inhibit complement mediated lysis. Similar results are disclosed in U.S. Pat. No. 5,648,260 issued on Jul. 15, 1997, and U.S. Pat. No. 5,624,821 issued on Apr. 29, 1997.

[0394] The residue Pro331 has been implicated in C1q binding by analysis of the ability of human IgG subclasses to carry out complement mediated cell lysis. Mutation of Ser331 to Pro331 in IgG4 conferred the ability to activate complement. (Tao et al., J. Exp. Med., 178:661-667 (1993); Brekke et al., Eur. J. Immunol., 24:2542-47 (1994)).

[0395] From the comparison of the data of the Winter group, and the Tao et al. and Brekke et al. papers, Ward and Ghetie concluded in their review article that there are at least two different regions involved in the binding of C1q: one on the β-strand of the CH2 domain bearing the Glu318, Lys320 and Lys322 residues, and the other on a turn located in close proximity to the same β-strand, and containing a key amino acid residue at position 331.

[0396] Other reports suggest that human IgG1 residues Leu235, and Gly237, located in the lower hinge region, play a critical role in complement fixation and activation. Xu et al., J. Immunol. 150:152A (Abstract) (1993). WO94/29351 published Dec. 22, 1994 reports that amino acid residues necessary for C1q and FcR binding of human IgG1 are located in the N-terminal region of the CH2 domain, i.e. residues 231 to 238.

[0397] It has further been proposed that the ability of IgG to bind C1q and activate the complement cascade also depends on the presence, absence, or modification of the carbohydrate moiety positioned between the two CH2 domains (which is normally anchored at Asn297). Ward and Ghetie, Therapeutic Immunology 2:77-94 (1995) at page 81.

[0398] The binding site on human and murine antibodies for FcγR have been previously mapped to the so-called “lower hinge region” consisting of residues 233-239 (EU index numbering as in Kabat et al., Sequences of Proteins of Immunological Interest, 5th Ed. Public Health Service, National Institutes of Health, Bethesda, Md. (1991)). Woof et al. Molec. Immunol. 23:319-330 (1986); Duncan et al. Nature 332:563 (1988); Canfield and Morrison, J. Exp. Med. 173:1483-1491 (1991); Chappel et al., Proc. Natl. Acad. Sci USA 88:9036-9040 (1991). Of residues 233-239, P238 and S239 have been cited as possibly being involved in binding, but these two residues have never been evaluated by substitution or deletion.

[0399] Other previously cited areas possibly involved in binding to FcγR: G316-K338 (human IgG) for human FcγRI (by sequence comparison only; no substitution mutants were evaluated) (Woof et al. Molec. Immunol 23:319-330 (1986)); K274-R301 (human IgG1) for human FcγRIII (based on peptides) (Sarmay et al. Molec. Immunol. 21:43-51 (1984)); Y407-R416 (human IgG) for human FcγRIII (based on peptides) (Gergely et al. Biochem. Soc. Trans. 12:739-743 (1984)).

[0400] U.S. Pat. No. 6,165,745 discloses a method of producing an antibody with a decreased biological half-life by introducing a mutation into the DNA segment encoding the antibody. The mutation includes an amino acid substitution at position 253, 310, 311, 433, or 434 of the Fc-hinge domain. The full disclosure of U.S. Pat. No. 6,165,745, as well as the full disclosure of all other U.S. patent references cited herein, are hereby incorporated by reference.

[0401] U.S. Patent Application No. 20020098193 A1 and PCT Publication No. WO 97/34621 disclose mutant IgG molecules having increased serum half-lives relative to IgG wherein the mutant IgG molecule has at least one amino acid substitution in the Fc-hinge region. However, no experimental support is provided for mutations at positions 250, 314, or 428.

[0402] U.S. Pat. No. 6,277,375 B1 discloses a composition comprising a mutant IgG molecule having an increased serum half-life relative to the wild-type IgG, wherein the mutant IgG molecule comprises the amino acid substitutions: threonine to leucine at position 252, threonine to serine at position 254, or threonine to phenylalanine at position 256. A mutant IgG with an amino acid substitution at position 433, 435, or 436 is also disclosed.

[0403] U.S. Pat. No. 6,528,624 discloses a variant of an antibody comprising a human IgG Fc region, which variant comprises an amino acid substitution at one or more of amino acid positions 270, 322, 326, 327, 329, 331, 333, and 334 of the human IgG Fc region.

[0404] In accordance with the above description and the teachings of the art, it is contemplated that in some embodiments, an antibody used in methods of the invention may comprise one or more alterations as compared to the wild type counterpart antibody, e.g. in the Fc region. These antibodies would nonetheless retain substantially the same characteristics required for therapeutic utility as compared to their wild type counterpart. For example, it is thought that certain alterations can be made in the Fc region that would result in altered (i.e., either improved or diminished) C1q binding and/or Complement Dependent Cytotoxicity (CDC), e.g., as described in WO99/51642. See also Duncan & Winter Nature 322:738-40 (1988); U.S. Pat. No. 5,648,260; U.S. Pat. No. 5,624,821; and WO94/29351 concerning other examples of Fc region variants. WO00/42072 (Presta) and WO 2004/056312 (Lowman) describe antibody variants with improved or diminished binding to FcRs. The content of these patent publications are specifically incorporated herein by reference. See, also, Shields et al. J. Biol. Chem. 9(2): 6591-6604 (2001). Antibodies with increased half lives and improved binding to the neonatal Fc receptor (FcRn), which is responsible for the transfer of maternal IgGs to the fetus (Guyer et al., J. Immunol. 117:587 (1976) and Kim et al., J. Immunol. 24:249 (1994)), are described in US2005/0014934 μl (Hinton et al.). These antibodies comprise an Fc region with one or more substitutions therein which improve binding of the Fc region to FcRn. Polypeptide variants with altered Fc region amino acid sequences and increased or decreased C1q binding capability are described in U.S. Pat. No. 6,194,551B1, WO99/51642. The contents of those patent publications are specifically incorporated herein by reference. See, also, Idusogie et al. J. Immunol. 164:4178-4184 (2000).

Functional Assays of Molecules with Variant Fc Regions

[0405] The ability of any particular antibody e.g., any one or more of the anti-antibodies disclosed herein, to mediate lysis of the target cell by complement activation and/or ADCC can be assayed. Functional assays for identifying potent Fc variants of any one or more of the anti-Notch1 antibodies of the invention are well known to one skilled in the art. See, for example, U.S. Patent Application Publications 2005/0037000 and 2005/0064514, and International Patent Application Publication WO 04/063351 (each of which is hereby incorporated by reference in its entirety); that describe yeast display technology for characterizing an antibody with a variant Fc region. Likewise, R-Fc binding assays are disclosed in U.S. Patent Application Publications 2005/0037000 and 2005/0064514, and International Patent Application Publication WO 04/063351 (each of which is hereby incorporated by reference in its entirety).

[0406] Examples of effector cell functions that can be assayed in accordance with the invention, include but are not limited to, antibody-dependent cell mediated cytotoxicity, phagocytosis, opsonization, opsonophagocytosis, C1q binding, and complement dependent cell mediated cytotoxicity. Any cell-based or cell free assay known to those skilled in the art for determining effector cell function activity can be used (For effector cell assays, see Perussia et al., 2000, Methods Mol. Biol. 121: 179-92; Baggiolini et al., 1998 Experientia, 44(10): 841-8; Lehmann et al., 2000 J. Immunol. Methods, 243(1-2): 229-42; Brown E J. 1994, Methods Cell Biol., 45: 147-64; Munn et al., 1990 J. Exp. Med., 172: 231-237, Abdul-Majid et al., 2002 Scand. J. Immunol. 55: 70-81; Ding et al., 1998, Immunity 8:403-411, each of which is incorporated by reference herein in its entirety).

[0407] Generally, the cells of interest are grown and labeled in vitro; the target antibody is added to the cell culture in combination with either serum complement or immune cells which may be activated by the antigen-antibody complexes. Cytolysis of the target cells is detected by the release of label from the lysed cells. In fact, antibodies can be screened using the patient's own serum as a source of complement and/or immune cells. The antibody that is capable of activating complement or mediating ADCC in the in vitro test can then be used therapeutically in that particular patient.

[0408] Preferably, the effector cells used in the ADCC assays of the invention are peripheral blood mononuclear cells (PBMC) that are preferably purified from normal human blood, using standard methods known to one skilled in the art, e.g. using Ficoll-Paque density gradient centrifugation.

[0409] An exemplary assay for determining ADCC activity of such anti-Notch1 antibodies with variant Fc regions is based on a 51Cr release assay comprising of: labeling target cells with [51Cr]Na2CrO4 (this cell-membrane permeable molecule is commonly used for labeling since it binds cytoplasmic proteins and although spontaneously released from the cells with slow kinetics, it is released massively following target cell necrosis); osponizing the target cells with the anti-antibodies with variant Fc region(s) of the invention; combining the opsonized radiolabeled target cells with effector cells in a microtitre plate at an appropriate ratio of target cells to effector cells; incubating the mixture of cells for 16-18 hours at 37° C.; collecting supernatants; and analyzing radioactivity. The cytotoxicity of the anti-antibodies with variant Fc regions can then be determined using known formulae, for example using the following formula: % lysis=(experimental cpm−target leak cpm)/(detergent lysis cpm−target leak cpm).times.100%. Alternatively, % lysis=(ADCC−AICC)/(maximum release−spontaneous release). Specific lysis can be calculated using the formula: specific lysis=% lysis with the anti-antibodies with variant Fc region(s) of the invention-% lysis in the absence of the anti-antibodies with variant Fc region(s) of the invention. A graph can be generated by varying either the target:effector cell ratio or antibody concentration. Perussia et al., 2000, Methods Mol. Biol. 121: 179-92.

[0410] The affinities and binding properties of anti-antibodies with variant Fc regions for an FcγR may initially be determined using in vitro assays (biochemical or immunological based assays) known in the art for determining Fc-FcγR interactions, i.e., specific binding of an Fc region to an FcγR including but not limited to ELISA assay, surface plasmon resonance assay, immunoprecipitation assays. Preferably, the binding properties of the anti-antibodies with variant Fc regions in accordance with the invention may also be characterized by in vitro functional assays for determining one or more FcγR mediator effector cell functions. In some embodiments, the anti-Notch Fc variants of the invention have similar binding properties in in vivo models as those in in vitro based assays. However, the present invention does not exclude molecules of the invention that do not exhibit the desired phenotype in in vitro based assays but do exhibit the desired phenotype in vivo.

[0411] Methods for generating anti-antibodies with variant Fc regions are known. DNA encoding an amino acid sequence variant of any one or more of the herein disclosed starting anti-Notch antibodies may be prepared by a variety of methods known in the art. These methods include, but are not limited to, preparation by site-directed (or oligonucleotide-mediated) mutagenesis, PCR mutagenesis, and cassette mutagenesis of an earlier prepared DNA encoding the antibody. In an alternative embodiment of the invention, however, a nucleic acid encoding an Fc region of a parent antibody is available and this nucleic acid sequence is altered to generate a variant nucleic acid sequence encoding the Fc region variant.

[0412] Site-directed mutagenesis is a preferred method for preparing substitution variants. This technique is well known in the art (see, e.g., Carter et al. Nucleic Acids Res. 13:4431-4443 (1985) and Kunkel et al, Proc. Natl. Acad. Sci. USA 82:488 (1985)). Briefly, in carrying out site-directed mutagenesis of DNA, the starting DNA is altered by first hybridizing an oligonucleotide encoding the desired mutation to a single strand of such starting DNA. After hybridization, a DNA polymerase is used to synthesize an entire second strand, using the hybridized oligonucleotide as a primer, and using the single strand of the starting DNA as a template. Thus, the oligonucleotide encoding the desired mutation is incorporated in the resulting double-stranded DNA.

[0413] PCR mutagenesis is also suitable for making amino acid sequence variants of the starting polypeptide. See Higuchi, in PCR Protocols, pp. 177-183 (Academic Press, 1990); and Vallette et al., Nuc. Acids Res. 17:723-733 (1989). Briefly, when small amounts of template DNA are used as starting material in a PCR, primers that differ slightly in sequence from the corresponding region in a template DNA can be used to generate relatively large quantities of a specific DNA fragment that differs from the template sequence only at the positions where the primers differ from the template.

[0414] Another method for preparing variants, cassette mutagenesis, is based on the technique described by Wells et al., Gene 34:315-323 (1985). The starting material is the plasmid (or other vector) comprising the starting polypeptide DNA to be mutated. The codon(s) in the starting DNA to be mutated are identified. There must be a unique restriction endonuclease site on each side of the identified mutation site(s). If no such restriction sites exist, they may be generated using the above-described oligonucleotide-mediated mutagenesis method to introduce them at appropriate locations in the starting polypeptide DNA. The plasmid DNA is cut at these sites to linearize it. A double-stranded oligonucleotide encoding the sequence of the DNA between the restriction sites but containing the desired mutation(s) is synthesized using standard procedures, wherein the two strands of the oligonucleotide are synthesized separately and then hybridized together using standard techniques. This double-stranded oligonucleotide is referred to as the cassette. This cassette is designed to have 5′ and 3′ ends that are compatible with the ends of the linearized plasmid, such that it can be directly ligated to the plasmid. This plasmid now contains the mutated DNA sequence.

[0415] Alternatively, or additionally, the desired amino acid sequence encoding an anti-Fc variant can be determined, and a nucleic acid sequence encoding such amino acid sequence variant can be generated synthetically.

[0416] In certain embodiments, the modification entails one or more amino acid substitutions. The substitution may, for example, be a “conservative substitution”.

[0417] In some embodiments, the molecules of the invention with altered affinities for activating and/or inhibitory receptors having variant Fc regions, have one or more amino acid modifications.

[0418] The Fc regions of any one or more of the herein disclosed anti-antibodies may be optimized for a variety of properties. Properties that may be optimized include but are not limited to enhanced or reduced affinity for an FcγR. In one embodiment, the Fc variants are optimized to possess enhanced affinity for a human activating FcγR, preferably FcγRI, FcγRIIa, FcγRIIc, FcγRIIIa, and FcγRIIIb, most preferably FcγRIIIa. In an alternative embodiment, the Fc region is optimized to possess reduced affinity for the human inhibitory receptor FcγRIIb. These embodiments are anticipated to provide anti-antibodies with enhanced therapeutic properties in humans, for example enhanced effector function and greater anti-cancer potency.

[0419] In an alternate embodiment, the Fc variants of the present invention are optimized to have reduced or ablated affinity for a human FcγRI (should this be FcγR), including but not limited to FcγRI, FcγRIIa, FcγRIIb, FcγRIIc, FcγRIIIa, and IFcγRIIb (should this be FcγRIIIb. These embodiments are anticipated to provide anti-Notch1 antibodies with enhanced therapeutic properties in humans, for example reduced effector function and reduced toxicity. As is known in the art, cancer cells can be grafted or injected into mice to mimic a human cancer, a process referred to as xenografting. Testing of any one or more of the anti-Notch1 antibodies that comprise Fc variants that are optimized for one or more mouse FcγR, may provide valuable information with regard to the efficacy of the antibody, its mechanism of action, and the like.

[0420] The Fc variants of the present invention may also be optimized for enhanced functionality and/or solution properties in aglycosylated form. In one embodiment, the aglycosylated Fc variants of the present invention bind an Fc ligand with greater affinity than the aglycosylated form of the parent Fc polypeptide. Exemplary Fc ligands include but are not limited to FcγRs, C1q, FcRn, and proteins A and G, and may be from any source, preferably human. In an alternative embodiment, the Fc variants of the invention are optimized to be more stable and/or more soluble than the aglycosylated form of the parent Fc polypeptide.

[0421] Certain aspects of this invention thus involve antibodies which are (a) directed against a particular antigen and (b) belong to a subclass or isotype that is capable of mediating the lysis of cells to which the antibody molecule binds. More specifically, these antibodies should belong to a subclass or isotype that, upon complexing with cell surface proteins, activates serum complement and/or mediates antibody dependent cellular cytotoxicity (ADCC) by activating effector cells such as natural killer cells or macrophages. Towards this end, it may be desirable to modify the antibody of the invention with respect to effector function, so as to enhance the effectiveness of the antibody in treating cancer, for example. For example, cysteine residue(s) may be introduced in the Fc region, thereby allowing interchain disulfide bond formation in this region. The homodimeric antibody thus generated may have improved internalization capability and/or increased complement-mediated cell killing and antibody-dependent cellular cytotoxicity (ADCC). See Caron et al., J. Exp Med. 176:1191-1195 (1992) and Shopes, B. J. Immunol. 148:2918-2922 (1992). Homodimeric antibodies with enhanced anti-tumor activity may also be prepared using heterobifunctional cross-linkers as described in Wolff et al. Cancer Research 53:2560-2565 (1993). Alternatively, any one or more of the anti-antibodies of the invention can be engineered with dual Fc regions and may thereby have enhanced complement lysis and ADCC capabilities. See Stevenson et al. Anti-Cancer Drug Design 3:219-230 (1989).

[0422] In yet another embodiment, the anti-antibodies with variant Fc region(s) of the invention are characterized for antibody dependent cellular cytotoxicity (ADCC) see, e.g., Ding et al, Immunity, 1998, 8:403-11; which is incorporated herein by reference in its entirety.

[0423] In another example, one or more amino acids in the Fc region can be replaced with a different amino acid residue such that the antibody has altered C1q binding and/or reduced or abolished complement dependent cytotoxicity (CDC). This approach is described in further detail in U.S. Pat. No. 6,194,551 by Idusogie et al.

[0424] In another example, one or more amino acid residues within amino acid positions 231 and 239 are altered to thereby alter the ability of the antibody to fix complement. This approach is described further in PCT Publication WO 94/29351 by Bodmer et al.

[0425] A broad aspect of the invention thus relates to immunoglobulins (e.g., anti-antibodies disclosed herein), comprising a variant Fc region, having one or more amino acid modifications (e.g., substitutions, but also including insertions or deletions) in one or more regions, which modifications alter, e.g., increase or decrease, the affinity of the variant Fc region for an FcγR. As binding to FcγRIIb decreases ADCC, it is important to increase binding to FcγRIIIA and decrease binding to FcγRIIB. Thus, in certain embodiments, said one or more amino acid modification increases the affinity of the variant Fc region for FcγRIIIA and/or FcγRIIA.

[0426] In certain embodiments, the herein described anti-antibodies with a variant Fc region further specifically bind FcγRIIB (via the Fc region) with a lower affinity than a comparable antibody molecule (i.e., having the same amino acid sequence as the antibody with a variant Fc region except for the one or more amino acid modifications in the Fc region) comprising the wild-type Fc region binds FcγRIIB.

[0427] In some embodiments, the invention encompasses molecules comprising a variant Fc region, wherein said variant Fc region comprises at least one amino acid modification relative to a wild type Fc region, which variant Fc region does not bind any FcγR or binds with a reduced affinity, relative to a comparable molecule comprising the wild-type Fc region, as determined by standard assays (e.g., in vitro assays) known to one skilled in the art. In a specific embodiment, the invention encompasses molecules comprising a variant Fc region, wherein said variant Fc region comprises at least one amino acid modification relative to a wild type Fc region, which variant Fc region only binds one FcγR, wherein the FcγR is FcγRIIIA. In another specific embodiment, the invention encompasses molecules comprising a variant Fc region, wherein said variant Fc region comprises at least one amino acid modification relative to a wild type Fc region, which variant Fc region only binds one FcγR wherein the FcγR is FcγRIIA. In yet another embodiment, the invention encompasses an anti-antibody molecule comprising a variant Fc region, wherein the variant Fc region comprises at least one amino acid modification relative to a wild type Fc region, which variant Fc region only binds one FcγR wherein the FcγR is FcγRIIB.

[0428] In yet another embodiment, provided herein is at least one or more anti-antibodies which comprises an antigen binding region and a variant Fe region, wherein the variant Fc region: (A) differs from a wild-type Fc region by comprising at least one amino acid modification according to the EU index as in Kabat, relative to the wild-type Fc region (unmodified), e.g., any one or more corresponding anti-antibodies disclosed herein that include the wild type Fc polypeptide; and (B) binds an FcγR with an increased affinity relative to a said wild-type Fc region.

[0429] The Fc variants of the present invention may be combined with other Fc modifications, including but not limited to modifications that alter effector function or interaction with one or more Fc ligands. Such combination may provide additive, synergistic, or novel properties in antibodies or Fc fusions. In one embodiment, the Fc variants of the present invention may be combined with other known Fc variants (Duncan et al., 1988, Nature 332:563-564; Lund et al., 1991, J Immunol 147:2657-2662; Lund et al., 1992, Mol Immunol 29:53-59; Alegre et al., 1994, Transplantation 57:1537-1543; Hutchins et al., 1995, Proc Natl Acad Sci USA 92:11980-11984; Jefferis et al., 1995, Immunol Left 44:111-117; Lund et al., 1995, Faseb J9:115-119; Jefferis et al., 1996, Immunol Left 54:101-104; Lund et al., 1996, J Immunol 157:4963-4969; Armour et al., 1999, Eur J Immunol 29:2613-2624; Idusogie et al., 2000, J Immunol 164:4178-4184; Reddy et al., 2000, J Immunol 164:1925-1933; Xu et al., 2000, Cell Immunol 200:16-26; Idusogie et al., 2001, J Immunol 166:2571-2575; Shields et al., 2001, J Biol Chem 276:6591-6604; Jefferis et al., 2002, Immunol Left 82:57-65; Presta et al., 2002, Biochem Soc Trans 30:487-490; Hinton et al., 2004, J Biol Chem 279:6213-6216) (U.S. Pat. No. 5,624,821; U.S. Pat. No. 5,885,573; U.S. Pat. No. 6,194,551; PCT WO 00/42072; PCT WO 99/58572; US 2004/0002587 A1). In an alternate embodiment, the Fc variants of the present invention are incorporated into an antibody or Fc fusion that comprises one or more engineered glycoforms (infra). Thus combinations of the Fc variants of the present invention with other Fc modifications, as well as undiscovered Fc modifications, are contemplated with the goal of generating novel antibodies or Fc fusions with optimized properties.

[0430] B. Anti-Notch1 Engineered Glycoforms

[0431] The invention additionally, encompasses anti-antibodies including fragments thereof which are differentially modified during or after translation, e.g., by glycosylation, proteolytic cleavage etc. Any of numerous chemical modifications may be carried out by known techniques, including but not limited to, specific chemical cleavage by trypsin, papain, metabolic synthesis in the presence of tunicamycin etc.

[0432] Antibodies are glycoproteins containing carbohydrate structures at conserved positions in the heavy chain constant regions, with each isotype possessing a distinct array of N-linked carbohydrate structures, which variably affect protein assembly, secretion or functional activity. The structure of the attached N-linked carbohydrate varies considerably and can include high-mannose, multiply-branched as well as biantennary complex oligosaccharides. (Wright, A., and Morrison, S. L., Trends Biotech. 15:26-32 (1997)). The major carbohydrate units are attached to amino acid residues of the constant region of the antibody. Carbohydrate is also known to attach to the antigen binding sites of some antibodies and may affect the antibody-binding characteristics by limiting access of the antigen to the antibody binding site. Typically, there is heterogeneous processing of the core oligosaccharide structures attached at a particular glycosylation site such that even monoclonal antibodies exist as multiple glycoforms. Likewise, it has been shown that major differences in antibody glycosylation occur between cell lines, and even minor differences are seen for a given cell line grown under different culture conditions. (Lifely, M. R. et al., Glycobiology 5(8):813-22 (1995)).

[0433] Monoclonal antibodies often achieve their therapeutic benefit through two binding events. First, the variable domain of the antibody binds to a specific tumor receptor on the surface of the target cell. This is followed by recruitment of effector cells such as natural killer (NK) cells that bind to the constant region (Fc) of the antibody and destroy cells to which the antibody has bound. This process, known as antibody-dependent cell cytotoxicity (ADCC), partially depends on a specific N-glycosylation event at Asn 297 in the Fc domain of the heavy chain of IgG1s. In general, antibodies that lack this N-glycosylation structure still bind antigen but cannot mediate ADCC, apparently as a result of reduced affinity of the Fc domain of the antibody for the Fc receptor FcγRIIIa on the surface of NK cells. Interestingly, there is a linear increase of in vitro complement activation with increasing terminal galactosylation of the carbohydrate moiety in the Fc domain. There are a number of roles associated with the carbohydrate units. Glycosylation may affect overall solubility and the rate of catabolism of the antibody. It is also known that carbohydrate is necessary for cellular secretion of some antibody chains. It has been demonstrated that glycosylation of the constant region plays a vital role in the effector functioning of an antibody; without this glycosylation in its correct configuration, the antibody may be able to bind to the antigen but may not be able to bind for example to macrophages, helper and suppressor cells or complement, to carry out its role of blocking or lysing the cell to which it is bound. Hyperglycosylated proteins have been shown to exhibit increased serum half-life, are less sensitive to proteolysis and more heat-stable compared with the non-glycosylated forms. (Leatherbarrow et al., Mol. Immunol. 22:407 (1985)).

[0434] IgG1 type antibodies, which represent the most commonly used antibodies in cancer immunotherapy, are glycoproteins that have a conserved N-linked glycosylation site at Asn297 in each CH2 domain. The two complex bi-antennary oligosaccharides attached to Asn297 are buried between the CH2 domains, forming extensive contacts with the polypeptide backbone, and their presence is essential for the antibody to mediate effector functions such as antibody dependent cellular cytotoxicity (ADCC) (Lifely, M. R., et al., Glycobiology 5:813-822 (1995); Jefferis, R., et al., Immunol Rev. 163:59-76 (1998); Wright, A. and Morrison, S. L., Trends Biotechnol. 15:26-32 (1997)). Glycosylation of IgG at asparagine 297 in the C_{H}2 domain is also required for full capacity of IgG to activate the classical pathway of complement-dependent cytolysis (Tao and Morrison, J. Immunol. 143:2595 (1989)).

[0435] More, glycosylation of IgM at asparagine 402 in the CH 3 domain is necessary for proper assembly and cytolytic activity of the antibody (Muraoka and Shulman, J. Immunol. 142:695 (1989)). Likewise, removal of glycosylation sites as positions 162 and 419 in the CH1 and CH3 domain of an IgA antibody has been shown to lead to intracellular degradation and at least 90% inhibition of secretion (Taylor and Wall, Mol. Cell. Biol. 8:4197 (1988)).

[0436] Glycosylation of immunoglobulins in the variable (V) region has also been observed. Sox and Hood, Proc. Natl. Acad. Sci. USA 66:975 (1970), reported that about 20% of human antibodies are glycosylated in the V region. Glycosylation of the V domain is believed to arise from fortuitous occurrences of the N-linked glycosylation signal Asn-Xaa-Ser/Thr in the V region sequence and has not been recognized in the art as playing an important role in immunoglobulin function.

[0437] It has also been reported that glycosylation at CDR2 of the heavy chain, in the antigen binding site, of a murine antibody specific for α-(1-6)dextran increases its affinity for dextran (Wallick et al., J. Exp. Med. 168:1099 (1988) and Wright et al., EMBO J. 10:2717 (1991)). See U.S. Pat. No. 6,933,368. Some classes and subclasses also have O-linked sugars, often in the hinge region, e.g. IgD and IgA from some species.

[0438] For example, the absence of fucose or the presence of a bisecting N-acetylglucosamine in the carbohydrate structure of the monoclonal antibody, has been positively correlated with the potency of ADCC. Specifically, defucosylated carbohydrate residues on monoclonal antibodies have been shown to enhance the ADCC capability of the target antibody more than threefold. “Glycosylation of therapeutic proteins in different production systems” Acta Paediatrica, 96: 17-22 (2007); Shields et al., “Lack of Fucose on Human IgG1 N-Linked Oligosaccharide Improves Binding to Human FcγRIII and Antibody-dependent Cellular Toxicity”, J. Biol. Chem., 277: 26733-26740 (2002). Likewise, specific engineered glycoforms of monoclonal antibodies, which interact solely with the FcγRIIIa receptor of natural killer cells, exhibit superior ADCC compared with heterogeneous glycoforms that interact with different Fc receptors. The collective data impel the conclusion that glycoengineering for directed glycosylation of therapeutic proteins can improve the therapeutic effect in vivo. See Umaa, P. et al., Nature Biotechnol. 17:176-180 (1999)). See also U.S. Pat. No. 5,624,821; U.S. Pat. No. 6,602,684; WO 00/42072 and WO 07/048122, the content of each of which is incorporated in its entirety by reference herein. See also US serial No. 2006/0182744. Not only is ADCC dependent on glycosylation of the Fc domain, but the degree of cell-mediated killing is also sensitive to the composition of the glycans in the Fc region of the antibody.

[0439] As a consequence, the present invention, in related embodiments, provides “Engineered Glycoforms” of any one or more of the anti-antibodies disclosed herein including fragments thereof, wherein the glycosylation profiles of the antibody are altered to enhance their use in the treatment of specific types of cancers or other disease states.

[0440] By “engineered glycoform” as used herein is meant a carbohydrate composition that is covalently attached to an Fc polypeptide, wherein the carbohydrate composition differs chemically from that of a parent Fc polypeptide. Engineered glycoforms may be useful for a variety of purposes, including but not limited to enhancing or reducing effector function. Engineered glycoforms may be generated by a variety of methods known in the art (Umana et al., 1999, Nat Biotechnol 17:176-180; Davies et al., 2001, Biotechnol Bioeng 74:288-294; Shields et al., 2002, J Biol Chem 277:26733-26740; Shinkawa et al., 2003, J Biol Chem 278:3466-3473); (U.S. Pat. No. 6,602,684; U.S. Ser. No. 10/277,370; U.S. Ser. No. 10/113,929; PCT WO 00/61739A1; PCT WO 01/29246A1; PCT WO 02/31140A1; PCT WO 02/30954A1); (Potelligent™ technology [Biowa, Inc., Princeton, N.J.]; GlycoMAb™ glycosylation engineering technology [GLYCART biotechnology AG, Zurich, Switzerland)). Many of these techniques are based on controlling the level of fucosylated and/or bisecting oligosaccharides that are covalently attached to the Fc region, for example by expressing an Fc polypeptide in various organisms or cell lines, engineered or otherwise (for example Lec-13 CHO cells or rat hybridoma YB2/0 cells), by regulating enzymes involved in the glycosylation pathway (for example FUT8 [α1,6-fucosyltranserase] and/or β1-4-N-acetylglucosaminyltransferase III [GnTIII]), or by modifying carbohydrate(s) after the Fc polypeptide has been expressed. Engineered glycoform typically refers to the different carbohydrate or oligosaccharide; thus an Fc polypeptide, for example an antibody or Fc fusion, may comprise an engineered glycoform. Alternatively, engineered glycoform may refer to the Fc polypeptide that comprises the different carbohydrate or oligosaccharide.

[0441] Covalent modification of the target antibody included within the scope of this invention comprises altering the native glycosylation pattern of the polypeptide. “Altering the native glycosylation pattern” is intended for purposes herein to mean deleting one or more carbohydrate moieties found in the native target antibody, and/or adding one or more glycosylation sites that are not present in the native target antibody.

[0442] In still another embodiment, the glycosylation of an antibody is modified. For example, an aglycoslated antibody can be made (i.e., the antibody lacks glycosylation). Glycosylation can be altered to, for example, increase the affinity of the antibody for antigen. Such carbohydrate modifications can be accomplished by, for example, altering one or more sites of glycosylation within the antibody sequence. For example, one or more amino acid substitutions can be made that result in elimination of one or more variable region framework glycosylation sites to thereby eliminate glycosylation at that site. Such aglycosylation may increase the affinity of the antibody for antigen. Such an approach is described in further detail in U.S. Pat. Nos. 5,714,350 and 6,350,861 by Co et al.

[0443] Additionally or alternatively, an antibody can be made that has an altered type of glycosylation, such as a hypofucosylated antibody having reduced amounts of fucosyl residues or an antibody having increased bisecting GlcNac structures. Such altered glycosylation patterns have been demonstrated to increase the ADCC ability of antibodies. Such carbohydrate modifications can be accomplished by, for example, expressing the antibody in a host cell with altered glycosylation machinery. Cells with altered glycosylation machinery have been described in the art and can be used as host cells in which to express recombinant antibodies of the invention to thereby produce an antibody with altered glycosylation. For example, EP 1,176,195 by Hanai et al. describes a cell line with a functionally disrupted FUT8 gene, which encodes a fucosyl transferase, such that antibodies expressed in such a cell line exhibit hypofucosylation. PCT Publication WO 03/035835 by Presta describes a variant CHO cell line, Lec13 cells, with reduced ability to attach fucose to Asn(297)-linked carbohydrates, also resulting in hypofucosylation of antibodies expressed in that host cell (see also Shields, R. L. et al. (2002) J. Biol. Chem. 277:26733-26740). PCT Publication WO 99/54342 by Umana et al. describes cell lines engineered to express glycoprotein-modifying glycosyl transferases (e.g., beta(1,4)-N-acetylglucosaminyltransferase III (GnTIII)) such that antibodies expressed in the engineered cell lines exhibit increased bisecting GlcNac structures which results in increased ADCC activity of the antibodies (see also Umana et al. (1999) Nat. Biotech. 17:176-180).

[0444] Antibodies disclosed herein can be glycosylated in both the C-regions and in the V-regions. Obviously C-region glycosylation is dependent on the particular sequence which by definition defines the class and subclass of the antibody. As noted elsewhere, many classes of antibody have conserved N-linked glycosylation sites in the constant domains. For example all IgG antibodies have a conserved N-linked glycosylation site in the CH2 domain at residue Asn297.

[0445] Two basic types of glycosylation of therapeutic proteins are known: O-linked and N-linked glycosylation. O-linked glycosylation is initiated by the attachment of N-acetyl-galactosamine to a serine or threonine residue in the peptide backbone of the therapeutic protein. The proximal carbohydrate is the target for glycosyltransferases to form a mature O-glycan structure. It is difficult to predict where O-linked glycosylation will occur in the protein as there is no clear consensus amino acid sequence for O-linked glycosylation (3, 4). However, O-linked glycosylation is affected by secondary structural elements such as an extended β-turn. In contrast, consensus amino acid sequences are known for N-glycosylation. N-glycosylation occurs at a specific sequence motif, Asn-X-Thr/Ser (sequon or consensus sequence; where X is any amino acid except proline), and this consensus sequence must be accessible to the precursor transferring the enzyme. In the case where X=Pro, no glycosylation takes place. Asn-X-Thr/Ser sequences in β-turns can influence the protein conformation by N-linked glycosylation. As glycosylation precedes final protein folding, the structure of the resultant therapeutic protein may be altered, resulting in differences in activity or stability compared with the non-glycosylated form. Thus, recombinant antibodies of the invention can be modified to recreate or create additional glycosylation sites if desired, which is simply achieved by engineering the appropriate amino acid sequences (such as Asn-X-Ser, Asn-X-Thr, Ser, or Thr) into the primary sequence of the antibody. Glycosylation of polypeptides is typically either N-linked or O-linked. N-linked refers to the attachment of the carbohydrate moiety to the side chain of an asparagine residue. The tri-peptide sequences asparagine-X-serine and asparagine-X-threonine, where X is any amino acid except proline, are the recognition sequences for enzymatic attachment of the carbohydrate moiety to the asparagine side chain. Thus, the presence of either of these tri-peptide sequences in a polypeptide creates a potential glycosylation site. O-linked glycosylation refers to the attachment of one of the sugars N-acetylgalactosamine, galactose, or xylose, to a hydroxyamino acid, most commonly serine or threonine, although 5-hydroxyproline or 5-hydroxylysine may also be used.

[0446] Thus, in certain embodiments of the invention a mutant anti-antibody is provided that exhibits a higher affinity for its antigen e.g., receptor or endogenous binding partner, than a parent antibody that comprises a parent immunoglobulin chain, wherein the mutant immunoglobulin chain comprises an amino acid substitution that eliminates a variable region glycosylation site of the parent immunoglobulin chain, said elimination having the effect of increasing the affinity of the mutant antibody relative to the parent antibody. Alternative embodiments contemplate variants that are “aglycosylated.”

[0447] “Glycosylation sites” refer to amino acid residues which are recognized by a eukaryotic cell as locations for the attachment of sugar residues. The amino acids where carbohydrate, such as oligosaccharide, is attached are typically asparagine (N-linkage), serine (O-linkage), and threonine (O-linkage) residues. In order to identify potential glycosylation sites within an antibody or antigen-binding fragment, the sequence of the antibody is examined, for example, by using publicly available databases such as the website provided by the Center for Biological Sequence Analysis (see http://www.cbs.dtu.dk/services/NetNGlyc/ for predicting N-linked glycoslyation sites) and http://www.cbs.dtu.dk/services/NetOGlyc/ for predicting O-linked glycoslyation sites). Additional methods for altering glycosylation sites of antibodies are described in U.S. Pat. Nos. 6,350,861 and 5,714,350.

[0448] Several approaches have been attempted to alter the glycosylation state of IgG antibodies: inhibition of glycosylation by culturing cells in the presence of the drug tunicamycin (Leatherbarrow et al. 1985; Walker et al. 1989; Pound et al. 1993); treatment of glycoproteins with specific glycosidases that remove the entire oligosaccharide or specific residues (Tsuchiya et al. 1989; Boyd et al. 1995); or site-directed mutagenesis to remove either the carbohydrate addition site (Tao, Smith et al. 1993) or residues within the CH2 region that contact the core oligosaccharide residues (Lund, Takahashi et al. 1996). These studies have confirmed that the presence of carbohydrate is essential to antibody function.

[0449] Glycosylation can be achieved by methods known in the art, e.g., by producing the antibody in a mammalian host cell such as Chinese Hamster Ovary (CHO) cell or in yeast. Addition of glycosylation sites to the target antibody is conveniently accomplished by altering the amino acid sequence such that it contains one or more of the above-described tri-peptide sequences (for N-linked glycosylation sites). The alteration may also be made by the addition of, or substitution by, one or more serine or threonine residues to the native target antibody sequence (for O-linked glycosylation sites). For ease, the target antibody amino acid sequence is preferably altered through changes at the DNA level, particularly by mutating the DNA encoding the target antibody at preselected bases such that codons are generated that will translate into the desired amino acids. The DNA mutation(s) may be made using methods described above under the heading of “Amino Acid Sequence Variants of Target antibody”.

[0450] Yeast provides substantial advantages over bacteria for the production of immunoglobulin H and L chains. Yeasts carry out post-translational peptide modifications including glycosylation. A number of recombinant DNA strategies now exist which utilize strong promoter sequences and high copy number plasmids which can be used for production of the desired proteins in yeast. Yeast recognizes leader sequences of cloned mammalian gene products and secretes peptides bearing leader sequences (i.e., pre-peptides) (Hitzman, et al., 11th International Conference on Yeast, Genetics and Molecular Biology, Montpelier, France, Sep. 13-17, 1982).

[0451] Another means of increasing the number of carbohydrate moieties on the target antibody is by chemical or enzymatic coupling of glycosides to the polypeptide. These procedures are advantageous in that they do not require production of the polypeptide in a host cell that has glycosylation capabilities for N-and O-linked glycosylation. Depending on the coupling mode used, the sugar(s) may be attached to (a) arginine and histidine, (b) free carboxyl groups, (c) free sulfhydryl groups such as those of cysteine, (d) free hydroxyl groups such as those of serine, threonine, or hydroxyproline, (e) aromatic residues such as those of phenylalanine, tyrosine, or tryptophan, or (f) the amide group of glutamine. These methods are described in WO 87/05330 published Sep. 11, 1987, and in Aplin and Wriston (CRC Crit. Rev. Biochem., pp. 259-306 [1981]).

[0452] Moreover, the main species antibody or variant thereof may further comprise glycosylation variations, non-limiting examples of which include antibody comprising a G1 or G2 oligosaccharide structure attached to the Fc region thereof, antibody comprising a carbohydrate moiety attached to a light chain thereof (e.g. one or two carbohydrate moieties, such as glucose or galactose, attached to one or two light chains of the antibody, for instance attached to one or more lysine residues), antibody comprising one or two non-glycosylated heavy chains, or antibody comprising a sialidated oligosaccharide attached to one or two heavy chains thereof etc.

[0453] Immune effector functions are unnecessary or even deleterious in certain clinical settings. In another embodiment of the invention, antibodies or fragments thereof are altered wherein the constant region of the antibody is modified to reduce at least one constant region-mediated biological effector function relative to an unmodified antibody. Such modified antibodies are often referred to as “aglycosylated” antibodies. In order to improve the binding affinity of an antibody of the invention or antigen-binding fragment thereof to the antigen while minimizing or reducing its binding to the Fc receptor, the antibody can be mutated at particular regions necessary for Fc receptor (FcR) interactions (see e.g., Canfield, S. M. and S. L. Morrison (1991) J. Exp. Med. 173:1483-1491; and Lund, J. et al. (1991) J. of Immunol. 147:2657-2662). Reduction in FcR binding ability of the antibody may also reduce other effector functions which rely on FcR interactions, such as opsonization and phagocytosis and antigen-dependent cellular cytotoxicity, glycosylation sites of the antibody can be altered, for example, by mutagenesis (e.g., site-directed mutagenesis). As a consequence, such antibodies do not exhibit substantial immune effector functions that are dependent on glycosylation of the Fc region. Generally and preferably, an aglycosylated antibody of the invention does not exhibit substantial immune effector functions except for binding to FcRn. In some embodiments, an antibody of the invention or a fragment thereof does not possess substantial or completely lacks effector functions other than FcRn binding. In one embodiment, said effector function is complement lysis. In one embodiment, said effector function is antibody dependent cell cytotoxicity (ADCC). In one embodiment, the antibody fragment binds FcRn.

[0454] Aglycosylated antibodies can be produced by a variety of methods known in the art. A convenient method comprises expressing the antibody in a prokaryotic host cell such as E. coli. The amino acids where carbohydrate, such as oligosaccharide, is attached are typically asparagine (N-linkage), serine (O-linkage), and threonine (O-linkage) residues. In order to identify potential glycosylation sites within an antibody or antigen-binding fragment, the sequence of the antibody is examined, for example, by using publicly available databases such as the website provided by the Center for Biological Sequence Analysis (see http://www.cbs.dtu.dk/services/NetNGlyc/ for predicting N-linked glycoslyation sites) and http://www.cbs.dtu.dk/services/NetOGlyc/ for predicting O-linked glycoslyation sites). Additional methods for altering glycosylation sites of antibodies are described in U.S. Pat. Nos. 6,350,861 and 5,714,350.

[0455] Removal of carbohydrate moieties present on the native target antibody may also be accomplished chemically or enzymatically. Chemical deglycosylation requires exposure of the polypeptide to the compound trifluoromethanesulfonic acid, or an equivalent compound. This treatment results in the cleavage of most or all sugars except the linking sugar (N-acetylglucosamine or N-acetylgalactosamine), while leaving the polypeptide intact. Chemical deglycosylation is described by Hakimuddin et al. (Arch. Biochem. Biophys., 259:52 [1987]) and by Edge et al. (Anal. Biochem., 118:131 [1981]). Enzymatic cleavage of carbohydrate moieties on polypeptides can be achieved by the use of a variety of endo- and exo-glycosidases as described by Thotakura et al. (Meth. Enzymol. 138:350 [1987]). Glycosylation at potential glycosylation sites may be prevented by the use of the compound tunicamycin as described by Duskin et al. (J. Biol. Chem., 257:3105 [1982]). Tunicamycin blocks the formation of protein-N-glycoside linkages.

[0456] Thus, in some embodiments, the antibodies of the invention or an antigen-binding fragment thereof is modified to reduce or eliminate potential glycosylation sites. In still another embodiment, the constant region of the antibody, or fragment thereof of the invention is modified to reduce at least one constant region-mediated biological effector function relative to an unmodified antibody.

### Antibody Derivatives

[0457] The antibodies of the present invention can be further modified to contain additional nonproteinaceous moieties that are known in the art and readily available. Preferably, the moieties suitable for derivatization of the antibody are water soluble polymers. Non-limiting examples of water soluble polymers include, but are not limited to, polyethylene glycol (PEG), copolymers of ethylene glycol/propylene glycol, carboxymethylcellulose, dextran, polyvinyl alcohol, polyvinyl pyrrolidone, poly-1,3-dioxolane, poly-1,3,6-trioxane, ethylene/maleic anhydride copolymer, polyaminoacids (either homopolymers or random copolymers), and dextran or poly(n-vinyl pyrrolidone)polyethylene glycol, propropylene glycol homopolymers, prolypropylene oxide/ethylene oxide co-polymers, polyoxyethylated polyols (e.g., glycerol), polyvinyl alcohol, and mixtures thereof. Polyethylene glycol propionaldehyde may have advantages in manufacturing due to its stability in water. The polymer may be of any molecular weight, and may be branched or unbranched. The number of polymers attached to the antibody may vary, and if more than one polymers are attached, they can be the same or different molecules. In general, the number and/or type of polymers used for derivatization can be determined based on considerations including, but not limited to, the particular properties or functions of the antibody to be improved, whether the antibody derivative will be used in a therapy under defined conditions, etc.

[0458] Other modifications of the antibody are contemplated herein. For example, the antibody may be linked to one of a variety of nonproteinaceous polymers, e.g., polyethylene glycol, polypropylene glycol, polyoxyalkylenes, or copolymers of polyethylene glycol and polypropylene glycol. The antibody also may be entrapped in microcapsules prepared, for example, by coacervation techniques or by interfacial polymerization (for example, hydroxymethylcellulose or gelatin-microcapsules and poly-(methylmethacylate) microcapsules, respectively), in colloidal drug delivery systems (for example, liposomes, albumin microspheres, microemulsions, nano-particles and nanocapsules), or in macroemulsions. Such techniques are disclosed in Remington's Pharmaceutical Sciences, 16th edition, Oslo, A., Ed., (1980). In Vivo Stabilization Using Polymeric Stabilizing Moieties—PEGylation:

[0459] Another type of covalent modification of the target antibody, e.g., any one or more of the anti-Notch1 antibodies of the invention comprises linking the target antibody to various nonproteinaceous polymers, e.g. polyethylene glycol, polypropylene glycol or polyoxyalkylenes, in the manner set forth in U.S. Pat. Nos. 4,640,835; 4,496,689; 4,301,144; 4,670,417; 4,791,192 or 4,179,337. Thus, in some embodiments, the antibodies and antibody fragments of the invention may be chemically modified to provide a desired effect such as increased solubility, stability and circulating time of the polypeptide, or decreased immunogenicity.

[0460] The antibody or fragments thereof polypeptides may be modified at random positions within the molecule, or at predetermined positions within the molecule and may include one, two, three or more attached chemical moieties. For example, PEGylation of antibodies and antibody fragments of the invention may be carried out by any of the PEGylation reactions known in the art, See for example, EP 0 154 316 by Nishimura et al. and EP 0 401 384 by Ishikawa et al. Methods for determining the degree of substitution are discussed, for example, in Delgado et al., Crit. Rev. Thera. Drug Carrier Sys. 9:249-304 (1992). (each of which is incorporated by reference herein in its entirety). To PEGylate an antibody, the antibody, or fragment thereof, typically is reacted with polyethylene glycol (PEG), such as a reactive ester or aldehyde derivative of PEG, under conditions in which one or more PEG groups become attached to the antibody or antibody fragment. Preferably, the PEGylation is carried out via an acylation reaction or an alkylation reaction with a reactive PEG molecule (or an analogous reactive water-soluble polymer). As used herein, the term “polyethylene glycol” is intended to encompass any of the forms of PEG that have been used to derivatize other proteins, such as mono (C1-C10) alkoxy- or aryloxy-polyethylene glycol or polyethylene glycol-maleimide. In certain embodiments, the antibody to be PEGylated is an aglycosylated antibody

[0461] In another aspect, a single immunoglobulin variable domain derived from an invention antibody containing composition is stabilized in vivo by linkage or association with a (non-polypeptide) polymeric stabilizing moiety. Examples of this type of stabilization are described, for example, in WO99/64460 (Chapman et al.) and EP1,160,255 (King et al.), each of which is incorporated herein by reference. Specifically, these references describe the use of synthetic or naturally-occurring polymer molecules, such as polyalkylene, polyalkenylenes, polyoxyalkylenes or polysaccharides, to increase the in vivo half-life of immunoglobulin polypeptides. A typical example of a stabilizing moiety is polyethylene glycol, or PEG, a polyalkylene. The process of linking PEG to an immunoglobulin polypeptide is described in these references and is referred to herein as “PEGylation.” As described therein, an immunoglobulin polypeptide can be PEGylated randomly, as by attachment of PEG to lysine or other amino acids on the surface of the protein, or site-specifically, e.g., through PEG attachment to an artificially introduced surface cysteine residue. Depending upon the immunoglobulin, it may be preferred to use a non-random method of polymer attachment, because random attachment, by attaching in or near the antigen-binding site or sites on the molecule often alters the affinity or specificity of the molecule for its target antigen. Polyethylene glycol can also be attached to proteins using a number of different intervening linkers. For example, U.S. Pat. No. 5,612,460, the entire disclosure of which is incorporated herein by reference, discloses urethane linkers for connecting polyethylene glycol to proteins. Protein-polyethylene glycol conjugates wherein the polyethylene glycol is attached to the protein by a linker can also be produced by reaction of proteins with compounds such as MPEG-succinimidylsuccinate, MPEG activated with 1,1′-carbonyldiimidazole, MPEG-2,4,5-trichloropenylcarbonate, MPEG-p-nitrophenolcarbonate, and various MPEG-succinate derivatives. A number of additional polyethylene glycol derivatives and reaction chemistries for attaching polyethylene glycol to proteins are described in WO 98/32466, the entire disclosure of which is incorporated herein by reference. PEGylated protein products produced using the reaction chemistries set out herein are included within the scope of the invention.

[0462] One system for attaching polyethylene glycol directly to amino acid residues of proteins without an intervening linker employs tresylated MPEG, which is produced by the modification of monmethoxy polyethylene glycol (MPEG) using tresylchloride (ClSO₂CH₂CF₃). Upon reaction of protein with tresylated MPEG, polyethylene glycol is directly attached to amine groups of the protein. Thus, the invention includes protein-polyethylene glycol conjugates produced by reacting proteins of the invention with a polyethylene glycol molecule having a 2,2,2-trifluoroethane sulphonyl group.

[0463] A general method for preparing PEGylated antibodies and antibody fragments of the invention will generally comprise the steps of (a) reacting the antibody or antibody fragment with polyethylene glycol, such as a reactive ester or aldehyde derivative of PEG, under conditions whereby the antibody or antibody fragment becomes attached to one or more PEG groups, and (b) obtaining the reaction products. It will be apparent to one of ordinary skill in the art to select the optimal reaction conditions or the acylation reactions based on known parameters and the desired result.

[0464] There are a number of attachment methods available to those skilled in the art, e.g., EP 0 401 384, herein incorporated by reference (coupling PEG to G-CSF), see also Malik et al., Exp. Hematol. 20:1028-1035 (1992) (reporting PEGylation of GM-CSF using tresyl chloride). For example, polyethylene glycol may be covalently bound through amino acid residues via a reactive group, such as, a free amino or carboxyl group. Reactive groups are those to which an activated polyethylene glycol molecule may be bound. The amino acid residues having a free amino group may include lysine residues and the N-terminal amino acid residues; those having a free carboxyl group may include aspartic acid residues, glutamic acid residues and the C-terminal amino acid residue. Sulfhydryl groups may also be used as a reactive group for attaching the polyethylene glycol molecules. Preferred for therapeutic purposes is attachment at an amino group, such as attachment at the N-terminus or lysine group.

[0465] As suggested above, polyethylene glycol may be attached to proteins via linkage to any of a number of amino acid residues. As indicated above, pegylation of the proteins of the invention may be accomplished by any number of means. For example, polyethylene glycol may be attached to the protein either directly or by an intervening linker. Linkerless systems for attaching polyethylene glycol to proteins are described in Delgado et al., Crit. Rev. Thera. Drug Carrier Sys. 9:249-304 (1992); Francis et al., Intern. J. of Hematol. 68:1-18 (1998); U.S. Pat. No. 4,002,531; U.S. Pat. No. 5,349,052; WO 95/06058; and WO 98/32466, the disclosures of each of which are incorporated herein by reference. For example, polyethylene glycol can be linked to a protein via covalent bonds to lysine, histidine, aspartic acid, glutamic acid, or cysteine residues. One or more reaction chemistries may be employed to attach polyethylene glycol to specific amino acid residues (e.g., lysine, histidine, aspartic acid, glutamic acid, or cysteine) of the protein or to more than one type of amino acid residue (e.g., lysine, histidine, aspartic acid, glutamic acid, cysteine and combinations thereof) of the protein.

[0466] One may specifically desire proteins chemically modified at the N-terminus. Using polyethylene glycol as an illustration of the present composition, one may select from a variety of polyethylene glycol molecules (by molecular weight, branching, etc.), the proportion of polyethylene glycol molecules to protein (or peptide) molecules in the reaction mix, the type of PEGylation reaction to be performed, and the method of obtaining the selected N-terminally PEGylated protein. The method of obtaining the N-terminally PEGylated preparation (i.e., separating this moiety from other mono-PEGylated moieties if necessary) may be by purification of the N-terminally PEGylated material from a population of PEGylated protein molecules. Selective proteins chemically modified at the N-terminus may be accomplished by reductive alkylation which exploits differential reactivity of different types of primary amino groups (lysine versus the N-terminal) available for derivatization in a particular protein. Under the appropriate reaction conditions, substantially selective derivatization of the protein at the N-terminus with a carbonyl group containing polymer is achieved.

[0467] The polymer may be of any molecular weight, and may be branched or unbranched. Branched polyethylene glycols are described, for example, in U.S. Pat. No. 5,643,575; Morpurgo et al., Appl. Biochem. Biotechnol. 56:59-72 (1996); Vorobjev et al., Nucleosides Nucleotides 18:2745-2750(1999); and Caliceti et al., Bioconjug. Chem. 10:638-646 (1999), the disclosures of each of which are incorporated herein by reference. For polyethylene glycol, the preferred molecular weight is between about 1 kDa and about 100 kDa (the term “about” indicating that in preparations of polyethylene glycol, some molecules will weigh more, some less, than the stated molecular weight) for ease in handling and manufacturing. Other sizes may be used, depending on the desired therapeutic profile (e.g., the duration of sustained release desired, the effects, if any on biological activity, the ease in handling, the degree or lack of antigenicity and other known effects of the polyethylene glycol to a therapeutic protein or analog).

[0468] It is preferred that the addition of PEG or another polymer does not interfere with the antigen-binding affinity or specificity of the antibody variable domain polypeptide. By “does not interfere with the antigen-binding affinity or specificity” is meant that the PEG-linked antibody single variable domain has an IC50 or ND50 which is no more than 10% greater than the IC50 or ND50, respectively, of a non-PEG-linked antibody variable domain having the same antibody single variable domain. In the alternative, the phrase “does not interfere with the antigen-binding affinity or specificity” means that the PEG-linked form of an antibody single variable domain retains at least 90% of the antigen binding activity of the non-PEGylated form of the polypeptide.

[0469] PEGylated antibodies and antibody fragments may generally be used to treat conditions that may be alleviated or modulated by administration of the antibodies and antibody fragments described herein. Generally the PEGylated antibodies and antibody fragments have increased half-life, as compared to the non-PEGylated antibodies and antibody fragments. The PEGylated antibodies and antibody fragments may be employed alone, together, or in combination with other pharmaceutical compositions.

[0470] The target antibody may also be entrapped in microcapsules prepared, for example, by coacervation techniques or by interfacial polymerization (for example, hydroxymethylcellulose or gelatin-microcapsules and poly-[methylmethacylate]microcapsules, respectively), in colloidal drug delivery systems (for example, liposomes, albumin microspheres, microemulsions, nano-particles and nanocapsules), or in macroemulsions. Such techniques are disclosed in Remington's Pharmaceutical Sciences, 16th edition, Osol, A., Ed., (1980).

### Antibody-Coated Liposomes and Therapeutics (Immunoliposomes)

[0471] Liposomal formulations are often used in therapeutics and pharmaceuticals. However, the biodistribution of liposomes in initial studies meant that such formulations were not widely applicable for use in humans. The technology of “stealth or stealthed” liposomes and formulations was thus developed, which allows liposomes to circulate for longer durations??. A preferred agent for use in stealthing liposomes is polyethylene glycol (PEG), and the resultant liposomes are also termed PEGylated liposomes.

[0472] Any one of the antibodies or fragments thereof disclosed herein may also be formulated as immunoliposomes. Liposomes containing the antibody are prepared by methods known in the art, such as described in Epstein et al., Proc. Natl. Acad. Sci. USA 82: 3688 (1985); Hwang et al., Proc. Natl. Acad Sci. USA 77: 4030 (1980); and U.S. Pat. Nos. 4,485,045 and 4,544,545. Liposomes with enhanced circulation time are disclosed in U.S. Pat. No. 5,013,556.

[0473] Particularly useful liposomes can be generated by the reverse phase evaporation method with a lipid composition comprising phosphatidylcholine, cholesterol and PEG-derivatized phosphatidylethanolamine (PEG-PE). Liposomes are extruded through filters of defined pore size to yield liposomes with the desired diameter. Fab′ fragments of the antibody of the present invention can be conjugated to the liposomes as described in Martin et al., J. Biol. Chem. 257: 286-288 (1982) via a disulfide interchange reaction. A chemotherapeutic agent (such as Doxorubicin) is optionally contained within the liposome. See Gabizon et al., J. National Cancer Inst. 81 (19): 1484 (1989).

[0474] Stealth liposomes have also been proposed for use in delivering cytotoxic agents to tumors in cancer patients. A range of drugs have been incorporated into stealth liposomes, including cisplatin (Rosenthal et al., 2002), TNFα (Kim et al., 2002), doxorubicin (Symon et al., 1999) and adriamycin (Singh et al., 1999), each reference being specifically incorporated herein by reference. However, recent reports have indicated unexpected low efficacy of stealth liposomal doxorubicin and vinorelbine in the treatment of metastatic breast cancer (Rimassa et al., 2003). See also U.S. Patent Application No. 20040170620, the content of which is incorporated in entirety by reference herein.

[0475] Thus, in certain embodiments, the invention provides improved stealthed liposome formulations, in which the stealthed liposomes are functionally associated or “coated” with an antibody that binds to an aminophospholipid or anionic phospholipid, preferably to PS or PE. The 9D2, 3G4 (ATCC 4545) and like, competing antibodies of the invention are preferred for such uses, although any antibody, or antigen binding region thereof, which binds to an aminophospholipid or anionic phospholipid may be used.

[0476] Any stealthed liposome may form the basis of the new liposomal formulations, and preferably a PEGylated liposome will be employed. The stealthed liposomes are “coated”, i.e., operatively or functionally associated with the antibody that binds to an aminophospholipid or anionic phospholipid. The operative or functional association is made such that the antibody retains the ability to specifically bind to the target aminophospholipid or anionic phospholipid, preferably PS or PE, thereby delivering or targeting the stealthed liposome and any contents thereof to PS- and/or PE-positive cells, such as tumor cells and tumor vascular endothelial cells.

[0477] The antibody-coated stealthed liposomes of the invention may be used alone. Preferably, however, such liposomes will also contain one or more second therapeutic agents, such as anti-cancer or chemotherapeutic agents (the first therapeutic agent being the antibody itself). The second therapeutic agents are generally described as being within the “core” of the liposome. Any one or more of the second, anti-cancer or chemotherapeutic agents known in the art and/or described herein for conjugation to antibodies, or for combination therapies, may be used in the antibody-coated stealthed liposomes of the invention, for example, any chemotherapeutic or radiotherapeutic agent, cytokine, anti-angiogenic agent or apoptosis-inducing agent. In certain embodiments, preferred chemotherapeutic agents are anti-tubulin drugs, docetaxel and paclitaxel.

[0478] Moreover, the antibody-coated stealthed liposomes of the invention may also be loaded with one or more anti-viral drugs for use in treating viral infections and diseases. As with the anti-cancer agents, any one or more of the second, anti-viral drugs known in the art and/or described herein for conjugation to antibodies, or for combination therapies, may be used in the antibody-coated stealthed liposomes of the invention.

[0479] In other embodiments of the invention the invention antibodies or antigen-binding fragments thereof are conjugated to albumen using art recognized techniques.

[0480] To increase the serum half life of the antibody, one may incorporate a salvage receptor binding epitope into the antibody (especially an antibody fragment) as described in U.S. Pat. No. 5,739,277, for example. As used herein, the term “salvage receptor binding epitope” refers to an epitope of the Fe region of an IgG molecule (e.g., IgG₁, IgG₂, IgG₃, or IgG₄) that is responsible for increasing the in vivo serum half-life of the IgG molecule.

### Species and Molecule Selectivity

[0481] The anti-Notch1 antibody of the invention including binding fragments thereof demonstrates both species and molecule selectivity. In one aspect, the anti-Notch1 antibody of the invention binds to human Notch1. Following the teachings of the specification, one may determine the species selectivity for the anti-Notch1 antibody using methods well known in the art. For instance, one may determine species selectivity using Western blot, FACS, ELISA or RIA. In a preferred embodiment, one may determine the species selectivity using Western blot.

[0482] Likewise, one may determine the selectivity of an anti-Notch1 antibody for Notch1 using methods well known in the art following the teachings of the specification. For instance, one may determine the molecule selectivity using Western blot, FACS, ELISA or RIA. In a preferred embodiment, one may determine the molecular selectivity using Western blot.

### Naked Antibody Therapy

[0483] A therapeutically effective amount of a naked fully human anti-Notch1 antibody, or fragments thereof can be formulated in a pharmaceutically acceptable excipient. The efficacy of the naked fully human Notch1 antibodies and their fragments can also be enhanced by supplementing these naked antibodies with one or more other naked antibodies, with one or more immunoconjugates of fully human invention Notch1 antibodies, conjugated with one or more therapeutic agents, including drugs, toxins, immunomodulators, hormones, oligonucleotides, hormone antagonists, enzymes, enzyme inhibitors, therapeutic radionuclides, an angiogenesis inhibitor, etc., administered concurrently or sequentially or according to a prescribed dosing regimen, with the Notch1 antibodies or fragments thereof.

### Antibody Dependent Enzyme Mediated Prodrug Therapy (ADEPT)

[0484] The antibody of the present invention may also be used in ADEPT by conjugating the antibody to a prodrug-activating enzyme which converts a prodrug (e.g., a peptidyl chemotherapeutic agent, see WO81/01145) to an active anti-cancer drug. See, for example, WO 88/07378 and U.S. Pat. No.4,975,278.

[0485] The enzyme component of the immunoconjugate useful for ADEPT includes any enzyme capable of acting on a prodrug in such a way so as to convert it into its more active, cytotoxic form.

[0486] Enzymes that are useful in the method of this invention include, but are not limited to, alkaline phosphatase useful for converting phosphate-containing prodrugs into free drugs; arylsulfatase useful for converting sulfate-containing prodrugs into free drugs; cytosine deaminase useful for converting non-toxic 5-fluorocytosine into the anti-cancer drug, 5-fluorouracil; proteases, such as serratia protease, thermolysin, subtilisin, carboxypeptidases and cathepsins (such as cathepsins B and L), that are useful for converting peptide-containing prodrugs into free drugs; D-alanylcarboxylpeptidascs, useful for converting prodrugs that contain D-amino acid substituents; carbohydrate-cleaving enzymes such as beta-galactosidase and neuraminidase useful for converting glycosylated prodrugs into free drugs; beta-lactamase useful for converting drugs derivatized with beta-lactams into free drugs; and penicillin amidases, such as penicillin V amidase or penicillin G amidase, useful for converting drugs derivatized at their amine nitrogens with phenoxylacetyl or phenylacetyl groups, respectively, into free drugs. Alternatively, antibodies with enzymatic activity, also known in the art as “abzymes”, can be used to convert to prodrugs of the invention into free active drugs (Massey, Nature 328: 457-458 (1987)). Antibody-abzyme conjugates can be prepared as described herein for delivery of the abzyme to a tumor cell population.

[0487] The enzymes of this invention can be covalently bound to the antibody mutant by techniques well known in the art such as the use of the heterobifunctional crosslinking reagents discussed above. Alternatively, fusion proteins comprising at least the antigen binding region of an antibody of the invention linked to at least a functionally active portion of an enzyme of the invention can be constructed using recombinant DNA techniques well known in the art (Neubergeret et al., Nature 312: 604-608(1984)).

[0488] Antibodies with enzymatic activity, known as catalytic antibodies or “abzymes”, can also be employed to convert prodrugs into active drugs. Abzymes based upon the antibodies of the invention, preferably the 9D2 and 3G4 and like antibodies, thus form another aspect of the present invention. The technical capacity to make abzymes also exists within those of ordinary skill in the art, as exemplified by Massey et al. (1987), specifically incorporated herein by reference for purposes of supplementing the abzyme teaching. Catalytic antibodies capable of catalyzing the breakdown of a prodrug at the carbamate position, such as a nitrogen mustard aryl carbamate, are further contemplated, as described in EP 745,673, specifically incorporated herein by reference.

Screening for Antibodies with Desired Properties

[0489] Techniques for generating antibodies have been described above. The antibodies of the present invention can be characterized for their physical/chemical properties and biological functions by various assays known in the art. In some embodiments, antibodies are characterized for any one or more of binding to Notch1 receptor protein, and/or reduction or blocking of Notch receptor activation; and/or reduction or blocking of Notch receptor downstream molecular signaling; and/or disruption or blocking of Notch receptor binding to its native ligand, e.g, serrate or delta etc; and/or promotion of endothelial cell proliferation; and/or inhibition of endothelial cell differentiation; and/or inhibition of arterial differentiation; and/or inhibition of tumor vascular perfusion; and/or treatment and/or prevention of a tumor, cell proliferative disorder or a cancer; and/or treatment or prevention of a disorder associated with Notch1 expression and/or activity; and/or treatment or prevention of a disorder associated with Notch receptor expression and/or activity.

[0490] In certain embodiments, antibodies may be selected based upon certain biological characteristics such as for example assessing the growth inhibitory effects of an anti-Notch1 antibody of the invention. This property may be assessed by methods known in the art, e.g., using cells which express Notch receptor either endogenously or following transfection with the Notch receptor gene. For example, tumor cell lines and Notch receptor-transfected cells may be treated with an anti-Notch receptor monoclonal antibody of the invention at various concentrations for a few days (e.g., 2-7) days and stained with crystal violet or MTT or analyzed by some other colorimetric assay. Another method of measuring proliferation would be by comparing ³H-thymidine uptake by the cells treated in the presence or absence of an anti-Notch receptor antibody of the invention. After antibody treatment, the cells are harvested and the amount of radioactivity incorporated into the DNA quantitated in a scintillation counter. Appropriate positive controls include treatment of a selected cell line with a growth inhibitory antibody known to inhibit growth of that cell line. Preferably, the Notch receptor agonist will inhibit cell proliferation of a Notch receptor-expressing tumor cell in vitro or in vivo by about 25-100% compared to the untreated tumor cell, more preferably, by about 30-100%, and even more preferably by about 50-100% or 70-100%, at an antibody concentration of about 0.5 to 30 μg/ml. Growth inhibition can be measured at an antibody concentration of about 0.5 to 30 μg/ml or about 0.5 nM to 200 nM in cell culture, where the growth inhibition is determined 1-10 days after exposure of the tumor cells to the antibody. The antibody is growth inhibitory in vivo if administration of the anti-Notch receptor antibody at about 1 μg/kg to about 100 mg/kg body weight results in reduction in tumor size or tumor cell proliferation within about 5 days to 3 months from the first administration of the antibody.

[0491] The purified antibodies can be further characterized by a series of assays including, but not limited to, N-terminal sequencing, amino acid analysis, non-denaturing size exclusion high pressure liquid chromatography (HPLC), mass spectrometry, ion exchange chromatography and papain digestion.

[0492] The assaying method for detecting Notch1 using the antibodies of the invention or binding fragments thereof are not particularly limited. Any assaying method can be used, so long as the amount of antibody, antigen or antibody-antigen complex corresponding to the amount of antigen (e.g., the level of Notch1) in a fluid to be tested can be detected by chemical or physical means and the amount of the antigen can be calculated from a standard curve prepared from standard solutions containing known amounts of the antigen. Representative immunoassays encompassed by the present invention include, but are not limited to, those described in U.S. Pat. No. 4,367,110 (double monoclonal antibody sandwich assay); Wide et al., Kirkham and Hunter, eds. Radioimmunoassay Methods, E. and S. Livingstone, Edinburgh (1970); U.S. Pat. No. 4,452,901 (western blot); Brown et al., J. Biol. Chem. 255: 4980-4983 (1980) (immunoprecipitation of labeled ligand); and Brooks et al., Clin. Exp. Immunol. 39:477 (1980) (immunocytochemistry); immunofluorescence techniques employing a fluorescently labeled antibody, coupled with light microscopic, flow cytometric, or fluorometric detection etc. See also Immunoassays for the 80's, A. Voller et al., eds., University Park, 1981, Zola, Monoclonal Antibodies: A Manual of Techniques, pp. 147-158 (CRC Press, Inc. 1987).

[0493] (1) Sandwich assays involve the use of two antibodies, each capable of binding to a different immunogenic portion, or epitope, of the protein to be detected. In a sandwich assay, the test sample analyte is bound by a first antibody which is immobilized on a solid support, and thereafter a second antibody binds to the analyte, thus forming an insoluble three-part complex. See, e.g., U.S. Pat. No. 4,376,110. The second antibody may itself be labeled with a detectable moiety (direct sandwich assays) or may be measured using an anti-immunoglobulin antibody that is labeled with a detectable moiety (indirect sandwich assay). For example, one type of sandwich assay is an ELISA assay, in which case the detectable moiety is an enzyme.

[0494] In the sandwich assay, the immobilized antibody of the present invention is reacted with a test fluid (primary reaction), then with a labeled form of antibody of the present invention (secondary reaction), and the activity of the labeling agent on the immobilizing carrier is measured, whereby the Notch1 level in the test fluid can be quantified. The primary and secondary reactions may be performed simultaneously or with some time intervals. The methods of labeling and immobilization can be performed by modifications of those methods described above. In the immunoassay by the sandwich assay, the antibody used for immobilized or labeled antibody is not necessarily from one species, but a mixture of two or more species of antibodies may be used to increase the measurement sensitivity, etc. In the method of assaying Notch1 by the sandwich assay, for example, when the antibodies used in the primary reaction recognize the partial peptides at the C-terminal region of Notch1, the antibodies used in the secondary reaction are preferably those recognizing partial peptides other than the C-terminal region (i.e., the N-terminal region). When the antibodies used for the primary reaction recognize partial peptides at the N-terminal region of Notch1, the antibodies used in the secondary reaction, antibodies recognizing partial peptides other than the N-terminal region (i.e., the C-terminal region) are preferably employed.

[0495] Other types of “sandwich” assays, which can also be useful for detecting Notch1, are the so-called “simultaneous” and “reverse” assays. A simultaneous assay involves a single incubation step wherein the antibody bound to the solid support and labeled antibody are both added to the sample being tested at the same time. After the incubation is completed, the solid support is washed to remove the residue of fluid sample and uncomplexed labeled antibody. The presence of labeled antibody associated with the solid support is then determined as it would be in a conventional “forward” sandwich assay.

[0496] In the “reverse” assay, stepwise addition first of a solution of labeled antibody to the fluid sample followed by the addition of unlabeled antibody bound to a solid support after a suitable incubation period, is utilized. After a second incubation, the solid phase is washed in conventional fashion to free it of the residue of the sample being tested and the solution of unreacted labeled antibody. The determination of labeled antibody associated with a solid support is then determined as in the “simultaneous” and “forward” assays. In one embodiment, a combination of antibodies of the present invention specific for separate epitopes can be used to construct a sensitive three-site immunoradiometric assay.

[0497] This type of assays may also be used to quantify Notch1 expression in whatever “sample” it may present itself. Thus, in certain aspects, the sandwich assay includes:

[0498] (i) a method for quantifying expression levels of Notch1 in a test fluid, comprising reacting the antibody specifically reacting with a partial peptide at the N-terminal region of the Notch1 immobilized on a carrier, a labeled form of the antibody specifically reacting with a partial peptide at the C-terminal region and the test fluid, and measuring the activity of the label; or

[0499] (ii) a method for quantifying Notch1 expression in a test fluid, comprising reacting the antibody specifically reacting with a partial peptide at the C-terminal region of the Notch1 immobilized onto a carrier, the antibody specifically reacting with a partial peptide at the N-terminal region of a labeled form of the Notch1 and the test fluid, and measuring the activity of the label; etc.

### (2) Competitive Assay

[0500] Competitive binding assays rely on the ability of a labeled standard to compete with the test sample analyte for binding with a limited amount of antibody. The amount of Notch1 protein in the test sample is inversely proportional to the amount of standard that becomes bound to the antibodies. To facilitate determining the amount of standard that becomes bound, the antibodies generally are insolubilized before or after the competition, so that the standard and analyte that are bound to the antibodies may conveniently be separated from the standard and analyte which remain unbound.

[0501] For quantifying the level of Notch1 expression, one skilled in the art may combine and/or competitively react antibodies of the invention or fragments thereof, a test fluid and a labeled form of Notch1, measure a ratio of the labeled Notch1 bound to the antibodies or fragments thereof b to thereby quantify the Notch1 in the test fluid.

### (3) Immunometric Assay

[0502] In the immunometric assay, an antigen in a test fluid and a solid phase antigen are competitively reacted with a given amount of a labeled form of the antibody of the present invention followed by separating the solid phase from the liquid phase; or an antigen in a test fluid and an excess amount of labeled form of the antibody of the present invention are reacted, then a solid phase antigen is added to bind an unreacted labeled form of the antibody of the present invention to the solid phase and the solid phase is then separated from the liquid phase. Thereafter, the labeled amount of any of the phases is measured to determine the antigen level in the test fluid.

[0503] Typical, and preferred, immunometric assays include “forward” assays in which the antibody bound to the solid phase is first contacted with the sample being tested to extract the Notch1 from the sample by formation of a binary solid phase antibody-Notch1 complex. After a suitable incubation period, the solid support is washed to remove the residue of the fluid sample, including unreacted Notch1, if any, and then contacted with the solution containing a known quantity of labeled antibody (which functions as a “reporter molecule”). After a second incubation period to permit the labeled antibody to complex with the Notch1 bound to the solid support through the unlabeled antibody, the solid support is washed a second time to remove the unreacted labeled antibody. This type of forward sandwich assay can be a simple “yes/no” assay to determine whether Notch1 is present or can be made quantitative by comparing the measure of labeled antibody with that obtained for a standard sample containing known quantities of Notch1. Such “two-site” or “sandwich” assays are described by Wide (Radioimmune Assay Method, Kirkham, ed., Livingstone, Edinburgh, 1970, pp. 199 206).

### (4) Nephrometry

[0504] In the nephrometry, the amount of insoluble sediment, which is produced as a result of the antigen-antibody reaction in a gel or in a solution, is measured. Even when the amount of an antigen in a test fluid is small and only a small amount of the sediment is obtained, a laser nephrometry utilizing laser scattering can be suitably used.

[0505] Examples of labeling agents, which may be used in the above referenced assay methods (1) to (4) using labeling agents, include radioisotopes (e.g., ¹²⁵I, ¹³¹I, ³H, ¹⁴C, ³²P, ³³P, ³⁵S, etc., fluorescent substances, e.g., cyanine fluorescent dyes (e.g., Cy2, Cy3, Cy5, Cy5.5, Cy7), fluorescamine, fluorescein isothiocyanate, etc., enzymes (e.g., β-galactosidase, β-glucosidase, alkaline phosphatase, peroxidase, malate dehydrogenase, etc.), luminescent substances (e.g., luminol, a luminol derivative, luciferin, lucigenin, etc.), biotin, lanthanides, etc. In addition, a biotin-avidin system may be used as well for binding an antibody to a labeling agent.

[0506] In the immobilization of antigens or antibodies, physical adsorption may be used. Alternatively, chemical binding that is conventionally used for immobilization of proteins, enzymes, etc. may be used as well. Examples of the carrier include insoluble polysaccharides such as agarose, dextran, cellulose, etc.; synthetic resins such as polystyrene, polyacrylamide, silicone, etc.; or glass; and the like.

[0507] In certain embodiments, the antibodies of the present invention are tested for their antigen binding activity. The antigen binding assays that are known in the art and can be used herein include without limitation any direct or competitive binding assays using techniques such as western blots, radioimmunoassays, ELISA (enzyme linked immunosorbent assay), “sandwich” immunoassays, immunoprecipitation assays, fluorescent immunoassays, and protein A immunoassays. Illustrative antigen binding assay are provided herein.

[0508] In some embodiments, the binding affinity of anti Notch1 antibodies is determined. Antibodies of the invention preferably have a binding affinity (K_{D}) to Notch1 of at least about 1×10⁻⁷ M, more preferably at least about 1.times.10⁻⁸ M, more preferably at least about 1.times.10⁻⁹ M, and most preferably at least about 1.times.10⁻¹⁰ M. Preferred antibody-producing cells of the invention produce substantially only antibodies having a binding affinity to Notch1 of at least about 1.times.10⁻⁷ M, more preferably at least about 1.times.10⁻⁸ M, more preferably at least about 1.times.10⁻⁹ M, and most preferably at least about 1.times.10⁻¹⁰ M. Preferred compositions of the invention comprise substantially only antibodies having a binding affinity to Notch1 of at least about 1.times.10⁻⁷ M, more preferably at least about 1.times.10⁻⁸ M, more preferably at least about 1.times.10⁻⁹ M, and most preferably at least about 1.times.10⁻¹⁰ M.

[0509] In another aspect of the invention, the antibodies of the invention bind to Notch1 with substantially the same K_{D} as an antibody that comprises one of the amino acid sequences selected from SEQ ID NOs: 3-22; 23-42; 43-45; 46-48; 49-76 and/or 77-104. In another embodiment, the antibody binds to Notch1 with substantially the same K_{D} as an antibody that comprises one or more CDRs selected from the group consisting of SEQ ID NOS: 207-221 (heavy chain) or SEQ ID NOs:222-253 (light chain).

[0510] Anti-Notch1 antibodies according to the invention or identified using the methods disclosed herein have a low dissociation rate. In one embodiment, the anti-Notch1 antibody has a K_{off} of 1×0.10⁻⁴ or lower, preferably a K_{off} that is 5×10⁻⁵ or lower. In another embodiment, the antibodies of to invention or those identified or produced using the methods of the invention bind to Notch1 with substantially the same K_{off} as an antibody that comprises one or more CDRs disclosed herein. Illustrative assays for affinity analysis are described herein.

### Affinity Analysis for Epitope(s)

[0511] Affinity can be either absolute or relative. By absolute affinity, it is meant that the assay for affinity gives defined numerical determinations of the affinity of one compound for another. Comparison of the affinity of the complex being tested to that of a reference compound whose binding affinity is known allows for the determination of relative binding affinity of the test ligand.

[0512] Whether absolute or relative, affinity of one molecule for another can be measured by any method known in the art. By way of non-limiting example, such methods include competition assays, surface plasmon resonance, half-maximal binding assays, competition assays, Scatchard analysis, direct force techniques (Wong et al., Direct force measurements of the streptavidin-biotin interaction, Biomol. Eng. 16:45-55, 1999), and mass spectrometry (Downard, Contributions of mass spectrometry to structural immunology, J. Mass Spectrom. 35:493-503, 2000).

[0513] The binding affinity and dissociation rate of an antibody to Notch1 may be determined by any method known in the art. For example, the binding affinity can be measured by competitive ELISAs, RIAs or surface plasmon resonance, such as BIAcore. The dissociation rate can also be measured by surface plasmon resonance. Alternatively, the binding affinity and dissociation rate is measured by surface plasmon resonance. More, the binding affinity and dissociation rate is measured using a BIAcore. See below for a brief description, it being understood the invention is not limited to the specific assays detailed herein.

[0514] 1. Absolute Affinity

[0515] As regards absolute affinity, “low affinity” refers to binding wherein the association constant (Kₐ) between two molecules is about 10⁵ M⁻¹ to 10⁷ M⁻¹. “Moderate affinity” refers to binding wherein the association constant (Kₐ) between two molecules is at least about 10⁷ M⁻¹ to 10⁸ M⁻¹. “High affinity” refers to a binding wherein the association constant between the two molecules is at least about 10⁸ M⁻¹ to about 10¹⁴ M⁻¹, and preferably about 10⁹ M⁻¹ to about 10¹⁴ M⁻¹, more preferably about 10¹⁰ M⁻¹ to about 10¹⁴ M⁻¹, and most preferably greater than about 10¹⁴ M⁻¹.

[0516] The dissociation constant, K_{d}, is an equilibrium constant for the dissociation of one species into two, e.g., the dissociation of a complex of two or more molecules into its components, for example, dissociation of a substrate from an enzyme. Exemplary K_{d} values for compositions of the present invention are from about 10⁻⁷ M (100 nM) to about 10⁻¹² M (0.001 nM). The stability constant is an equilibrium constant that expresses the propensity of a species to form from its component parts. The larger the stability constant, the more stable is the species. The stability constant (formation constant) is the reciprocal of the instability constant (dissociation constant).

[0517] The affinity of an invention antibody for a target epitope, or the affinity of a bi-specific antibody for a carrier epitope, is driven by non-covalent interactions. There are four main non-covalent attractive forces between molecules: (i) electrostatic forces, which occur between oppositely charged molecules such as amino groups and carboxylic groups; (ii) hydrogen bonds, which are formed when hydrogen atoms are shared between electronegative atoms such as nitrogen and oxygen; (iii) Van der Waals forces, which are generated between electron clouds around molecules oppositely polarized by neighboring atoms; and (iv) hydrophobic interactions, which are formed when water is excluded from the interface allowing hydrophobic molecules to interact in a waterless environment.

[0518] Non-covalent interactions can, but rarely do, have the strength of a covalent linkage (i.e., a chemical bond). In some instances, the affinity of the invention antibody for a target epitope, although driven by non-covalent interactions, is so high as to approach the strength of a covalent bond. This provides for invention antibodies that are very stable relative to other Notch receptor antibodies of the invention.

[0519] Preferably, the affinity of an invention antibody for its cognate target epitope, is a K_{D} of about 100 nM to about 0.01 nM; more preferably, greater than about 100 nM, or greater than about 10 nM; most preferably, greater than about 1 nM, or greater than about 0.1 nM. Typical K_{D} for target epitopes are from about 0.1 nM to 100 nM, preferably from about 0.1 nM to 10 nM, more preferably from about 0.5 nM to 5 nM, or about 1 nM.

[0520] In the invention, when multiple copies of a carrier epitope are present on the antibody, the affinity of an antibody for its cognate carrier epitope may be greater than the affinity of an antibody for a free carrier epitope or for a monovalent antibody comprising the carrier epitope. Additionally or alternatively, a multivalent targetable construct having x carrier epitopes has a greater affinity for its target epitope than would x number of constructs. Put another way, the compositions of the invention also provides for synergistic, rather than merely additive, binding effects.

[0521] 2. Surface Plasmon Resonance

[0522] Binding parameters such as K_{D} may be measured using surface plasmon resonance on a chip, for example, with a BIAcore® chip coated with immobilized binding components. Surface plasmon resonance is used to characterize the microscopic association and dissociation constants of reaction between an antibody or antibody fragment and its ligand. Such methods are generally described in the following references which are incorporated herein by reference. (Vely et al., BIAcore analysis to test phosphopeptide-SH2 domain interactions, Meth. Mol. Biol. 121:313-21, 2000; Liparoto et al., Biosensor analysis of the interleukin-2 receptor complex, J. Mol. Recog. 12:316-21, 1999; Lipschultz et al., Experimental design for analysis of complex kinetics using surface plasmon resonance, Methods 20:310-8, 2000; Malmqvist., BIACORE: an affinity biosensor system for characterization of biomolecular interactions, Biochem. Soc. Transactions 27:33540, 1999; Alfthan, Surface plasmon resonance biosensors as a tool in antibody engineering, Biosensors & Bioelectronics 13:653-63, 1998; Fivash et al., BIAcore for macromolecular interaction, Curr. Opin. Biotech. 9:97-101, 1998; Price et al., Summary report on the ISOBM TD-4 Workshop: analysis of 56 monoclonal antibodies against the MUC1 mucin, Tumour Biol. 19 Suppl 1:1-20, 1998; Malmqvist et al., Biomolecular interaction analysis: affinity biosensor technologies for functional analysis of proteins, Curr. Opin. Chem. Biol. 1:378-83, 1997; O'Shannessy et al., Interpretation of deviations from pseudo-first-order kinetic behavior in the characterization of ligand binding by biosensor technology, Anal. Biochem. 236:275-83, 1996; Malmborg et al., BIAcore as a tool in antibody engineering, J. Immunol. Meth. 183:7-13, 1995; Van Regenmortel, Use of biosensors to characterize recombinant proteins, Dev. Biol. Standardization 83:143-51, 1994; O'Shannessy, Determination of kinetic rate and equilibrium binding constants for macromolecular interactions: a critique of the surface plasmon resonance literature, Curr. Opin. Biotechnol. 5:65-71, 1994). Models using BIAcore to examine the binding of fixed ligands to multivalent compounds have been described (Muller et al., Model and simulation of multivalent binding to fixed ligands, Anal. Biochem. 261:149-158, 1998).

[0523] BIAcore® uses the optical properties of surface plasmon resonance (SPR) to detect alterations in protein concentration bound within to a dextran matrix lying on the surface of a gold/glass sensor chip interface, a dextran biosensor matrix. In brief, proteins are covalently bound to the dextran matrix at a known concentration and a ligand for the protein (e.g., antibody) is injected through the dextran matrix. Near infrared light, directed onto the opposite side of the sensor chip surface is reflected and also induces an evanescent wave in the gold film, which in turn, causes an intensity dip in the reflected light at a particular angle known as the resonance angle. If the refractive index of the sensor chip surface is altered (e.g., by ligand binding to the bound protein) a shift occurs in the resonance angle. This angle shift can be measured and is expressed as resonance units (RUs) such that 1000 RUs is equivalent to a change in surface protein concentration of 1 ng/mm 2. These changes are displayed with respect to time along the y-axis of a sensorgram, which depicts the association and dissociation of any biological reaction.

[0524] Additional details may be found in Jonsson et al., Introducing a biosensor based technology for real-time biospecific interaction analysis, Ann. Biol. Clin. 51:19-26, 1993; Jonsson et al., Real-time biospecific interaction analysis using surface plasmon resonance and a sensor chip technology, Biotechniques 11:620-627, 1991; Johnsson et al., Comparison of methods for immobilization to carboxymethyl dextran sensor surfaces by analysis of the specific activity of monoclonal antibodies, J. Mol. Recog. 8:125-131, 1995; and Johnsson, Immobilization of proteins to a carboxymethyldextran-modified gold surface for biospecific interaction analysis in surface plasmon resonance sensors, Anal. Biochem. 198:268-277, 1991; Karlsson et al., Kinetic analysis of monoclonal antibody-antigen interactions with a new biosensor based analytical system, J. Immunol. Meth. 145:229, 1991; Weinberger et al., Recent trends in protein biochip technology, Pharmacogenomics 1:395-416, 2000; Lipschultz et al., Experimental design for analysis of complex kinetics using surface plasmon resonance, Methods 20:310-8, 2000.

[0525] 3. Relative Affinity

[0526] Affinity may also be defined in relative terms, e.g., by IC₅₀. In the context of affinity, the IC₅₀ of a compound is the concentration of that compound at which 50% of a reference ligand is displaced from a target epitope in vitro or targeted tissue in vivo. Typically, IC₅₀ is determined by competitive ELISA. In still another embodiment, the invention provides anti-Notch1 monoclonal antibodies that compete with a conventional anti-Notch antibody for binding to Notch receptor protein. Such competitor antibodies include antibodies that recognize a Notch1 epitope that is the same as or overlaps with the Notch1 epitope recognized by any one of a conventional antibody. Such competitor antibodies can be obtained by assay well known to one skilled in the art. For example, they can b obtained by screening anti-Notch1 hybridoma supernatants for binding to immobilized Notch1 in competition with labeled 26.6, 26.14, 26.20, 26.34, and/or 26.82 antibodies. Alternatively, they can be used in a binding assay A hybridoma supernatant containing competitor antibody will reduce the amount of bound, labeled antibody detected in the subject competition binding mixture as compared to the amount of bound, labeled antibody detected in a control binding mixture containing irrelevant (or no) antibody. Any of the competition binding assays described herein are suitable for use in the foregoing procedure.

[0527] Anti-Notch1 antibodies of the invention possessing the unique properties described herein can be obtained by screening anti-Notch1 hybridoma clones for the desired properties by any convenient method. For example, if an anti-Notch1 monoclonal antibody that blocks or does not block the binding of Notch receptors to its binding partner e.g., a Notch ligand is desired, the candidate antibody can be tested in a binding competition assay, such as a competitive binding ELISA, wherein plate wells are coated with the binding partner, and a solution of antibody in an excess of the Notch receptor of interest is layered onto the coated plates, and bound antibody is detected enzymatically, e.g. contacting the bound antibody with HRP-conjugated anti-Ig antibody or biotinylated anti-Ig antibody and developing the HRP color reaction., e.g. by developing plates with streptavidin-HRP and/or hydrogen peroxide and detecting the HRP color reaction by spectrophotometry at 490 nm with an ELISA plate reader.

[0528] In one embodiment, the present invention contemplates an altered antibody that possesses some but not all effector functions, which make it a desired candidate for many applications in which the half life of the antibody in vivo is important yet certain effector functions (such as complement and ADCC) are unnecessary or deleterious. In certain embodiments, the Fc activities of the produced immunoglobulin are measured to ensure that only the desired properties are maintained. In vitro and/or in vivo cytotoxicity assays can be conducted to confirm the reduction/depletion of CDC and/or ADCC activities. For example, Fc receptor (FcR) binding assays can be conducted to ensure that the antibody lacks FcγR binding (hence likely lacking ADCC activity), but retains FcRn binding ability. The primary cells for mediating ADCC, NK cells, express FcγRIII only, whereas monocytes express FcγRI, FcγRII and FcγRIII. FcR expression on hematopoietic cells is summarized in Table 3 on page 464 of Ravetch and Kinet, Annu Rev. Immunol 9:457-92 (1991). An example of an in vitro assay to assess ADCC activity of a molecule of interest is described in U.S. Pat. No. 5,500,362 or 5,821,337. Useful effector cells for such assays include peripheral blood mononuclear cells (PBMC) and Natural Killer (NK) cells. Alternatively, or additionally, ADCC activity of the molecule of interest may be assessed in vivo, e.g., in a animal model such as that disclosed in Clynes et al. Proc. Natl. Acad. Sci. A 95:652-656 (1998). C1q binding assays may also be carried out to confirm that the antibody is unable to bind C1q and hence lacks CDC activity. To assess complement activation, a CDC assay, e.g. as described in Gazzano-Santoro et al., J. Immunol. Methods 202:163 (1996), may be performed. FcRn binding and in vivo clearance/half life determinations can also be performed using methods known in the art, e.g. those described in the Examples section.

### Identification of Notch1 Epitopes Recognized by Anti-Notch1 Antibody

[0529] One may determine whether an anti-Notch1 antibody derived from the antibodies of the invention or produced in accordance with the methods described above binds to the same antigen as another antibody, e.g., conventional antibody using a variety of methods known in the art. For instance, one may determine whether a test anti-Notch1 antibody binds to the same antigen by using an anti-Notch1 antibody to capture an antigen that is known to bind to the anti-Notch1 antibody, eluting the antigen from the antibody, and then determining whether the test antibody will bind to the eluted antigen.

[0530] One may determine whether a test antibody binds to the same epitope as an anti-Notch1 antibody by binding the anti-Notch1 antibody to Notch1 receptor protein under saturating conditions, and then measuring the ability of the test antibody to bind to Notch1. If the test antibody, e.g., anti-Notch1 antibodies derived from the invention antibodies or in accordance with the methods of the invention is able to bind to the Notch1 receptor protein at the same time as the reference anti-Notch1 antibody, then the test antibody binds to a different epitope as the anti-Notch1 antibody. However, if the test antibody is not able to bind to Notch1 receptor protein at the same time, then the test antibody binds to the same epitope as the human anti-Notch1 antibody. This experiment may be performed using ELISA, RIA or surface plasmon resonance. In certain embodiments, the experiment is performed using surface plasmon resonance, supra. In another embodiment, BIAcore is used, see supra. One may also determine whether an anti-Notch1 antibody cross-competes with a reference anti-Notch1 antibody. For example, one may determine whether a test anti-Notch1 antibody cross-competes with another by using the same method that is used to measure whether the anti-Notch1 antibody is able to bind to the same epitope as another anti-Notch1 antibody.

[0531] The diagnostic method may also be used to determine whether a tumor is potentially cancerous, if it expresses high levels of Notch1, or benign, if it expresses low levels of Notch1. Thus, for example, biological samples obtained from patients suspected of exhibiting an oncogenic disorder mediated by Notch1 may be assayed for the presence of Notch1 expressing cells.

[0532] As noted, the anti-Notch1 antibodies of the invention may be used to determine the levels of Notch1 receptor protein in a tissue or in cells derived from the tissue. In one embodiment, the tissue is a diseased tissue. In a more preferred embodiment, the tissue is a tumor or a biopsy thereof. In a preferred embodiment of the method, a tissue or a biopsy thereof is excised from a patient. The tissue or biopsy is then used in an immunoassay to determine, e.g., Notch1 levels, cell surface levels of Notch1, levels of tyrosine phosphorylation of Notch1, or localization of Notch1 by the methods discussed herein. The method can be used to determine tumors that express Notch1.

[0533] In a related embodiment, the present invention provides methods for diagnosing cancers by assaying for changes in the level of Notch1 in cells, tissues or body fluids compared with the levels in cells, tissues, or body fluids, preferably of the same type in a control sample. A change, especially an increase, in levels of Notch1 in the patient versus the control is associated with the presence of cancer. Typically, for a quantitative diagnostic assay, a positive result indicating that the patient being tested has cancer is one in which levels of Notch1 in or on cells, tissues or body fluid are at least two times higher, and preferably three to five times higher, or greater, than the levels of the antigens in or on the same cells, tissues, or body fluid of the control. Normal controls include a human without cancer and/or non-cancerous samples from the patient.

[0534] The in vitro diagnostic methods may include any method known to one skilled in the art including immunohistological or immunohistochemical detection of tumor cells (e.g., on human tissue, or on cells dissociated from excised tumor specimens), or serological detection of tumor associated antigens (e.g., in blood samples or other biological fluids). Immunohistochemical techniques involve staining a biological specimen, such as a tissue specimen, with one or more of the antibodies of the invention and then detecting the presence on the specimen of antibody-antigen complexes comprising antibodies bound to the cognate antigen. The formation of such antibody-antigen complexes with the specimen indicates the presence of cancer in the tissue.

[0535] Detection of the antibody on the specimen can be accomplished using techniques known in the art such as immunoenzymatic techniques, e.g., immunoperoxidase staining technique, or the avidin-biotin technique, or immunofluorescence techniques (see, e.g., Ciocca et al., 1986, “Immunohistochemical Techniques Using Monoclonal Antibodies”, Meth. Enzymol., 121:562 79 and Introduction to Immunology, Ed. Kimball, (2^{nd} Ed), Macmillan Publishing Company, 1986, pp. 113 117). Those skilled in the art can determine operative and optimal assay conditions by routine experimentation.

[0536] In another embodiment, the present invention assists in the diagnosis of cancers and tumors by the identification and measurement of the Notch1 receptor protein levels in biological samples. If Notch1 receptor protein is normally present, and the development of the oncogenic disorder is caused by an abnormal quantity of the cell surface receptor (Notch1), e.g., expression relative to normal, the assay should compare Notch1 levels in the biological sample to the range expected in normal, non-oncogenic tissue of the same cell type. Thus, a statistically significant increase in the amount of Notch1 bearing cells or Notch1 expression level in the subject relative to the control subject or subject's baseline, can be a factor that may lead to a diagnosis of an oncogenic disorder that is progressing or at risk for such a disorder. Likewise, the presence of high levels of Notch1 indicative of cancers likely to metastasize can also be detected. For those cancers that express the antigen recognized by the antibodies of the invention, e.g., Notch1, the ability to detect the antigen provides early diagnosis, thereby affording the opportunity for early treatment. Early detection is especially important for cancers difficult to diagnose in their early stages.

[0537] Moreover, the level of antigen detected and measured in a body fluid sample such as for example diseased tissue provides a means for monitoring the course of therapy for the cancer or tumor, including, but not limited to, surgery, chemotherapy, radiation therapy, the therapeutic methods of the present invention, and combinations thereof. By correlating the level of the antigen in the tissue sample with the severity of disease, the level of such antigen can be used to indicate successful removal of the primary tumor, cancer, and/or metastases, for example, as well as to indicate and/or monitor the effectiveness of other therapies over time. For example, a decrease in the level of the cancer or tumor-specific antigen over time indicates a reduced tumor burden in the patient. By contrast, no change, or an increase, in the level of antigen over time indicates ineffectiveness of therapy, or the continued growth of the tumor or cancer.

[0538] A typical in vitro immunoassay for detecting Notch1 comprises incubating a biological sample in the presence of a detectably labeled anti-Notch1 antibody or antigen binding fragment of the present invention capable of selectively binding to Notch1, and detecting the labeled fragment or antibody which is bound in a sample. The antibody is bound to a label effective to permit detection of the cells or portions (e.g., Notch1 or fragments thereof liberated from hyperplastic, dysplastic and/or cancerous cells) thereof upon binding of the antibody to the cells or portions thereof. The presence of any cells or portions thereof in the biological sample is detected by detection of the label.

[0539] The biological sample may be brought into contact with, and immobilized onto, a solid phase support or carrier, such as nitrocellulose, or other solid support or matrix, which is capable of immobilizing cells, cell particles, membranes, or soluble proteins. The support may then be washed with suitable buffers, followed by treatment with the detectably-labeled anti-Notch1 antibody. The solid phase support may then be washed with buffer a second time to remove unbound antibody. The amount of bound label on the solid support may then be detected by conventional means. Accordingly, in another embodiment of the present invention, compositions are provided comprising the monoclonal antibodies, or binding fragments thereof, bound to a solid phase support, such as described herein.

[0540] In vitro assays in accordance with the present invention also include the use of isolated membranes from cells expressing a recombinant Notch1, soluble fragments comprising the ligand binding segments of Notch1, or fragments attached to solid phase substrates. These assays allow for the diagnostic determination of the effects of either binding segment mutations and modifications, or ligand mutations and modifications, e.g., ligand analogues.

[0541] In certain embodiments the monoclonal antibodies and binding fragments thereof of the present invention may be used in in vitro assays designed to screen compounds for binding affinity to Notch1. See Fodor et al. Science 251: 767-773 (1991), incorporated herein by reference. In accordance with this objective, the invention contemplates a competitive drug screening assay, where the monoclonal antibodies or fragments thereof of the invention compete with a test compound for binding to Notch1. In this manner the monoclonal antibodies and fragments thereof are used to detect the presence of any polypeptide which shares one or more binding sites of the Notch1 and can be used to occupy binding sites on the receptor which might otherwise be occupied by the antibody.

[0542] In certain embodiments, the anti-Notch1 antibodies of the invention may be used to determine or quantify the amount of Notch1 on the cell surface after treatment of the cells with various compounds. This method can be used to test compounds that may be used to activate or inhibit Notch1. In this method, one sample of cells is treated with a test compound for a period of time while another sample is left untreated. If the total level of Notch1 is to be measured, the cells are lysed and the total Notch1 level is measured using one of the immunoassays described herein.

[0543] A preferred immunoassay for measuring total Notch1 receptor protein levels is an ELISA or Western blot. If only the cell surface level of Notch1 is to be measured, the cells are not lysed, and the cell surface levels of Notch1 are measured using any one or more of the assays known to the skilled artisan, e.g., one of the immunoassays described herein. A preferred immunoassay for determining cell surface levels of Notch1 includes the steps of labeling the cell surface proteins with a detectable label, such as biotin or ¹²⁵I, immunoprecipitating the Notch1 with an anti-Notch1 antibody and then detecting the labeled Notch1. Another preferred immunoassay for determining the localization of Notch1, e.g., cell surface levels, is by using immunohistochemistry.

[0544] As well, provided herein is a method to determine whether a conventional anti-Notch1 antibody decreases Notch1 expression on a target tumor tissue or cell. The term “conventional Notch1 antagonist” “conventional treatment with a Notch1 moiety” is used interchangeably to mean Notch1 specific monoclonal antibodies currently available that specifically target Notch1 expression and do not bind to the same epitope as the antibodies of the invention.

[0545] A further aspect of the invention is an assessment of the susceptibility that an individual has for developing cancer mediated by Notch1. The method comprises the steps of measuring the level of expression of Notch1 in a cell or tissue of interest, incubating the cell or tissue with an anti-Notch1 antibody or antigen-binding portion thereof, then re-measuring the level of Notch1 expression with an anti-Notch1 antibody or antigen binding fragment of the invention in the cell or tissue. Alternatively, ICD expression levels may be measured in the above example. A diagnosis that levels of Notch1 are low could be used for predicting that the patient is responding to treatment with the conventional anti-Notch1 antibody regiment. On the contrary, no change in the level of Notch1 or an increase in expression of Notch1 after treatment with a conventional anti-Notch1 antibody indicate that the patient is either unresponsive to the current treatment protocol or unlikely to respond to further treatment with the conventional anti-Notch1 antibody, thereby allowing for earlier intervention. The anti-Notch1 antibodies of the invention may be used in the above diagnostic assays either simultaneously with administration of the conventional Notch1 antibody or after treatment with the conventional anti-Notch1. Preferably, the conventional Notch1 antibody does not compete with the anti-Notch1 antibody of the invention for binding Notch1 protein. The above assays can be performed iteratively over a period of time to assess the therapeutic efficacy of a conventional anti-Notch1 antibody based therapeutic protocol. In this way, the anti-Notch1 antibody of the invention can be used as a “negative biomarker” allowing it to be used to assess the treatment and therapeutic protocol of a conventional anti-Notch1 antibody based therapy.

### Vectors, Host Cells and Recombinant Methods

[0546] The invention also includes nucleic acids encoding the heavy chain and/or light chain of the anti-Notch1 antibodies of the invention. Nucleic acids of the invention also include fragments of the nucleic acids of the invention. A “fragment” refers to a nucleic acid sequence that is preferably of sufficient length to encode a functionally active fragment of the invention antibodies, e.g., light or heavy chain. A “fragment” can also mean the whole coding sequence of a gene and may include 5′ and 3′ untranslated regions.

[0547] Constructs of any one or more polynucleotides having sequences as set forth herein can be generated synthetically. Alternatively, single-step assembly of a gene and entire plasmid from large numbers of oligodeoxyribonucleotides is described by, e.g., Stemmer et al., Gene (Amsterdam) (1995) 164(1):49-53. In this method, assembly PCR (the synthesis of long DNA sequences from large numbers of oligodeoxyribonucleotides) is derived from DNA shuffling (Stemmer, Nature (1994) 370:389-391).

[0548] Appropriate polynucleotide constructs are purified using standard recombinant DNA techniques as described in, for example, Sambrook et al., Molecular Cloning: A Laboratory Manual, 2nd Ed., (1989) Cold Spring Harbor Press, Cold Spring Harbor, N.Y. The gene product encoded by a polynucleotide of the invention is expressed in any expression system, including, for example, bacterial, yeast, insect, amphibian and mammalian systems. Vectors, host cells and methods for obtaining expression in same are well known in the art. Suitable vectors and host cells are described in U.S. Pat. No. No. 5,654,173.

[0549] Polynucleotide molecules comprising a polynucleotide sequence provided herein are generally propagated by placing the molecule in a vector. Viral and non-viral vectors are used, including plasmids. The choice of plasmid will depend on the type of cell in which propagation is desired and the purpose of propagation. Certain vectors are useful for amplifying and making large amounts of the desired DNA sequence. Other vectors are suitable for expression in cells in culture. Still other vectors are suitable for transfer and expression in cells in a whole animal or person. The choice of appropriate vector is well within the skill of the art. Many such vectors are available commercially. Methods for preparation of vectors comprising a desired sequence are well known in the art.

[0550] The polynucleotides set forth in one of SEQ ID NOs: 105-134 or 125-144 or 145-147 or 148-150 or their corresponding full-length polynucleotides are linked to regulatory sequences as appropriate to obtain the desired expression properties. These can include promoters (attached either at the 5′ end of the sense strand or at the 3′ end of the antisense strand), enhancers, terminators, operators, repressors, and inducers. The promoters can be regulated or constitutive. In some situations it may be desirable to use conditionally active promoters, such as tissue-specific or developmental stage-specific promoters. These are linked to the desired nucleotide sequence using the techniques described above for linkage to vectors. Any techniques known in the art can be used.

[0551] When any appropriate host cells or organisms are used to replicate and/or express the polynucleotides or nucleic acids of the invention, the resulting replicated nucleic acid, RNA, expressed protein or polypeptide, is within the scope of the invention as a product of the host cell or organism. The product is recovered by any appropriate means known in the art.

[0552] Expression of a target gene, e.g., corresponding to any one or more of the nucleic acid molecules set forth herein can be regulated in the cell to which the gene is native. For example, an endogenous gene of a cell can be regulated by an exogenous regulatory sequence as disclosed in U.S. Pat. No. 5,641,670.

[0553] The encoded antibody heavy chain preferably comprises an amino acid sequence selected from the group consisting of SEQ ID NOs: 3-22 and 43-45. The encoded antibody light chain preferably comprises an amino acid sequence of SEQ ID NO: 23-42 and 46-48.

[0554] In some embodiments, the invention provides nucleic acids encoding both a heavy chain and a light chain of an antibody of the invention. For example, a nucleic acid of the invention may comprise a nucleic acid sequence (SEQ ID NOs: 105-124) encoding an amino acid sequence of SEQ ID NOs: 3-22 and a nucleic acid sequence (SEQ ID Nos: 125-144) encoding an amino acid sequence of SEQ ID NOs: 23-42.

[0555] Nucleic acids of the invention include nucleic acids having at least 80%, more preferably at least about 90%, more preferably at least about 95%, and most preferably at least about 98% homology to nucleic acids of the invention. The terms “percent similarity”, “percent identity” and “percent homology” when referring to a particular sequence, are used as set forth in the University of Wisconsin GCG software program. Nucleic acids of the invention also include complementary nucleic acids. In some instances, the sequences will be fully complementary (no mismatches) when aligned. In other instances, there may be up to about a 20% mismatch in the sequences.

[0556] The invention also provides a nucleic acid molecule encoding the variable region of the light chain (V_{L}) as described herein as well as an amino acid sequence that is at least 70%, 75%, 80%, 85%, 90%, 95%, 96%, 97%, 98% or 99% identical to one of the amino acid sequences encoding a V_{L} as described herein, particularly to a V_{L} that comprises an amino acid sequence of one of SEQ ID NOs: 23-42. The invention also provides a nucleic acid sequence that is at least 70%, 75%, 80%, 85%, 90%, 95%, 96%, 97%, 98% or 99% identical to a nucleic acid sequence of one of SEQ ID NOs: 125-144. In another embodiment, the nucleic acid molecule encoding a V_{L} is one that hybridizes under highly stringent conditions to a nucleic acid sequence encoding a V_{L} as described above.

[0557] The invention also provides a nucleic acid molecule encoding the variable region of the heavy chain (V_{H}) as described herein as well as an amino acid sequence that is at least 70%, 75%, 80%, 85%, 90%, 95%, 96%, 97%, 98% or 99% identical to one of the amino acid sequences encoding a V_{H} as described herein, particularly to a V_{H} that comprises an amino acid sequence of one of SEQ ID NOs: 3-22. The invention also provides a nucleic acid sequence that is at least 70%, 75%, 80%, 85%, 90%, 95%, 96%, 97%, 98% or 99% identical to a nucleic acid sequence of one of SEQ ID NOs: 105-124. In another embodiment, the nucleic acid molecule encoding a V_{H} is one that hybridizes under highly stringent conditions to a nucleic acid sequence encoding a V_{H} as described above.

[0558] The term “selectively hybridize” referred to herein means to detectably and specifically bind. Polynucleotides, oligonucleotides and fragments thereof in accordance with the invention selectively hybridize to nucleic acid strands under hybridization and wash conditions that minimize appreciable amounts of detectable binding to nonspecific nucleic acids. “High stringency” or “highly stringent” conditions can be used to achieve selective hybridization conditions as known in the art and discussed herein. An example of “high stringency” or “highly stringent” conditions is a method of incubating a polynucleotide with another polynucleotide, wherein one polynucleotide may be affixed to a solid surface such as a membrane, in a hybridization buffer of 6.times. SSPE or SSC, 50% formamide, 5.times. Denhardt's reagent, 0.5% SDS, 100 μg/ml denatured, fragmented salmon sperm DNA at a hybridization temperature of 42° C. for 12 16 hours, followed by twice washing at 55° C. using a wash buffer of 1.times.SSC, 0.5% SDS. See also Sambrook et al., supra, pp. 9.50 9.55.

[0559] The nucleic acid molecule encoding either or both of the entire heavy and light chains of an anti-Notch1 antibodies or the variable regions thereof may be obtained from any source that produces an anti-Notch1 antibody. Methods of isolating mRNA encoding an antibody are well-known in the art (See, e.g., Sambrook et al.) The mRNA may be used to produce cDNA for use in the polymerase chain reaction (PCR) or cDNA cloning of antibody genes.

[0560] A nucleic acid molecule encoding the entire heavy chain of an anti-Notch1 antibody disclosed herein, e.g., SEQ ID NO: 105 may be constructed by fusing a nucleic acid molecule encoding the variable domain of a heavy chain or an antigen-binding domain thereof with a constant domain of a heavy chain. Similarly, a nucleic acid molecule encoding the light chain of the anti-Notch1 antibody of the invention, e.g., SEQ ID NO: 125 may be constructed by fusing a nucleic acid molecule encoding the variable domain of a light chain or an antigen-binding domain thereof with a constant domain of a light chain. The nucleic acid molecules encoding the V_{H} and V_{L} chain may be converted to full-length antibody genes by inserting them into expression vectors already encoding heavy chain constant and light chain constant regions, respectively, such that the V_{H} segment is operatively linked to the heavy chain constant region (C_{H}) segment(s) within the vector and the V_{L} segment is operatively linked to the light chain constant region (C_{L}) segment within the vector. Alternatively, the nucleic acid molecules encoding the V_{H} or V_{L} chains are converted into full-length antibody genes by linking, e.g., ligating, the nucleic acid molecule encoding a V_{H} chain to a nucleic acid molecule encoding a C_{H} chain using standard molecular biological techniques. The same may be achieved using nucleic acid molecules encoding V_{L} and C_{L} chains. The sequences of human heavy and light chain constant region genes are known in the art. See, e.g., Kabat et al., Sequences of Proteins of Immunological Interest, 5th Ed., NIH Publ. No. 91 3242, 1991. Nucleic acid molecules encoding the full-length heavy and/or light chains may then be expressed from a cell into which they have been introduced and the anti-Notch1 antibody isolated.

[0561] The nucleic acid molecules may be used to recombinantly express large quantities of anti-Notch1 antibodies using techniques known to one skilled in the art of recombinant biologist. Likewise, the herein described nucleic acid molecules can also be used to recombinantly produce any one of the anti-Notch1 antibody variants, mutants, fragments thereof or derivatives, including single chain antibodies, bispecific, scFv etc immunoadhesins, diabodies, mutated antibodies and antibody derivatives, as described further below.

[0562] In another embodiment, the nucleic acid molecules of the invention may be used as probes or PCR primers for specific antibody sequences. For instance, a nucleic acid molecule probe may be used in diagnostic methods or a nucleic acid molecule PCR primer may be used to amplify regions of DNA that could be used, inter alia, to isolate nucleic acid sequences for use in producing variable domains of anti-Notch1 antibodies. In a preferred embodiment, the nucleic acid molecules are oligonucleotides. In a more preferred embodiment, the oligonucleotides are from highly variable regions of the heavy and light chains of the antibody of interest. In an even more preferred embodiment, the oligonucleotides encode all or a part of one or more of the CDRs.

[0563] A “vector” is a replicon, such as a plasmid, cosmid, bacmid, phage, artificial chromosome (BAC, YAC) or virus, into which another genetic sequence or element (either DNA or RNA) may be inserted so as to bring about the replication of the attached sequence or element. A “replicon” is any genetic element, for example, a plasmid, cosmid, bacmid, phage, artificial chromosome (BAC, YAC) or virus, which is capable of replication largely under its own control. A replicon may be either RNA or DNA and may be single or double stranded. In some embodiments, the expression vector contains a constitutively active promoter segment (such as but not limited to CMV, SV40, Elongation Factor or LTR sequences) or an inducible promoter sequence such as the steroid inducible pIND vector (Invitrogen), where the expression of the nucleic acid can be regulated. The expression vector can be introduced into a cell by transfection,

[0564] In addition to the antibody chain genes, the recombinant expression vectors of the invention carry regulatory sequences that control the expression of the antibody chain genes in a host cell. It will be appreciated by those skilled in the art that the design of the expression vector, including the selection of regulatory sequences may depend on such factors as the choice of the host cell to be transformed, the level of expression of protein desired, etc. Preferred regulatory sequences for mammalian host cell expression include viral elements that direct high levels of protein expression in mammalian cells, such as promoters and/or enhancers derived from retroviral LTRs, cytomegalovirus (CMV) (such as the CMV promoter/enhancer), Simian Virus 40 (SV40) (such as the SV40 promoter/enhancer), adenovirus, (e.g., the adenovirus major late promoter (AdMLP)), polyoma and strong mammalian promoters such as native immunoglobulin and actin promoters. For further description of viral regulatory elements, and sequences thereof, see e.g., U.S. Pat. No. 5,168,062 by Stinski, U.S. Pat. No. 4,510,245 by Bell et al. and U.S. Pat. No. 4,968,615 by Schaffner et al.

[0565] In addition to the antibody chain genes and regulatory sequences, the recombinant expression vectors of the invention may carry additional sequences, such as sequences that regulate replication of the vector in host cells (e.g., origins of replication) and selectable marker genes. The selectable marker gene facilitates selection of host cells into which the vector has been introduced (see e.g., U.S. Pat. Nos. 4,399,216, 4,634,665 and 5,179,017, all by Axel et al.). For example, typically the selectable marker gene confers resistance to drugs, such as G418, hygromycin or methotrexate, on a host cell into which the vector has been introduced. Preferred selectable marker genes include the dihydrofolate reductase (DHFR) gene (for use in dhfr-host cells with methotrexate selection/amplification) and the neo gene (for G418 selection).

[0566] For recombinant production of an antibody of the invention, the nucleic acid encoding it is isolated and inserted into a replicable vector for further cloning (amplification of the DNA) or for expression. DNA encoding the antibody is readily isolated and sequenced using conventional procedures (e.g., by using oligonucleotide probes that are capable of binding specifically to genes encoding the heavy and light chains of the antibody). Many vectors are available. The choice of vector depends in part on the host cell to be used. Generally, preferred host cells are of either prokaryotic or eukaryotic (generally mammalian) origin. It will be appreciated that constant regions of any isotype can be used for this purpose, including IgG, IgM, IgA, IgD, and IgE constant regions, and that such constant regions can be obtained from any human or animal species.

a. Generating Antibodies Using Prokaryotic Host Cells:
i. Vector Construction

[0567] Polynucleotide sequences encoding polypeptide components of the antibody of the invention can be obtained using standard recombinant techniques. Desired polynucleotide sequences may be isolated and sequenced from antibody producing cells such as hybridoma cells. Alternatively, polynucleotides can be synthesized using nucleotide synthesizer or PCR techniques. Once obtained, sequences encoding the polypeptides are inserted into a recombinant vector capable of replicating and expressing heterologous polynucleotides in prokaryotic hosts. Many vectors that are available and known in the art can be used for the purpose of the present invention. Selection of an appropriate vector will depend mainly on the size of the nucleic acids to be inserted into the vector and the particular host cell to be transformed with the vector. Each vector contains various components, depending on its function (amplification or expression of heterologous polynucleotide, or both) and its compatibility with the particular host cell in which it resides. The vector components generally include, but are not limited to: an origin of replication, a selection marker gene, a promoter, a ribosome binding site (RBS), a signal sequence, the heterologous nucleic acid insert and a transcription termination sequence.

[0568] In general, plasmid vectors containing replicon and control sequences which are derived from species compatible with the host cell are used in connection with these hosts. The vector ordinarily carries a replication site, as well as marking sequences which are capable of providing phenotypic selection in transformed cells. For example, E. coli is typically transformed using pBR322, a plasmid derived from an E. coli species. pBR322 contains genes encoding ampicillin (Amp), kanamycin (Kn) and tetracycline (Tet) resistance and thus provides easy means for identifying transformed cells. pBR322, its derivatives, or other microbial plasmids or bacteriophage may also contain, or be modified to contain, promoters which can be used by the microbial organism for expression of endogenous proteins. Examples of pBR322 derivatives used for expression of particular antibodies are described in detail in Carter et al., U.S. Pat. No. 5,648,237.

[0569] A convenient vector is one that encodes a functionally complete human C_{H} or C_{L} immunoglobulin sequence, with appropriate restriction sites engineered so that any V_{H} or V_{L} sequence can be easily inserted and expressed, as described above. In such vectors, splicing usually occurs between the splice donor site in the inserted J region and the splice acceptor site preceding the human C region, and also at the splice regions that occur within the human C_{H} exons. Polyadenylation and transcription termination occur at native chromosomal sites downstream of the coding regions. The recombinant expression vector can also encode a signal peptide that facilitates secretion of the antibody chain from a host cell. The antibody chain gene may be cloned into the vector such that the signal peptide is linked in-frame to the amino terminus of the antibody chain gene. The signal peptide can be an immunoglobulin signal peptide or a heterologous signal peptide (i.e., a signal peptide from a non-immunoglobulin protein).

[0570] In addition, phage vectors containing replicon and control sequences that are compatible with the host microorganism can be used as transforming vectors in connection with these hosts. For example, bacteriophage such as λGEM™-11 may be utilized in making a recombinant vector which can be used to transform susceptible host cells such as E. coli LE392.

[0571] The expression vector of the invention may comprise two or more promoter-cistron pairs, encoding each of the polypeptide components. A promoter is an untranslated regulatory sequence located upstream (5′) to a cistron that modulates its expression. Prokaryotic promoters typically fall into two classes, inducible and constitutive. Inducible promoter is a promoter that initiates increased levels of transcription of the cistron under its control in response to changes in the culture condition, e.g. the presence or absence of a nutrient or a change in temperature.

[0572] A large number of promoters recognized by a variety of potential host cells are well known. The selected promoter can be operably linked to cistron DNA encoding the light or heavy chain by removing the promoter from the source DNA via restriction enzyme digestion and inserting the isolated promoter sequence into the vector of the invention. Both the native promoter sequence and many heterologous promoters may be used to direct amplification and/or expression of the target genes. In some embodiments, heterologous promoters are utilized, as they generally permit greater transcription and higher yields of expressed target gene as compared to the native target polypeptide promoter.

[0573] Promoters suitable for use with prokaryotic hosts include the PhoA promoter, the β-galactamase and lactose promoter systems, a tryptophan (trp) promoter system and hybrid promoters such as the tac or the trc promoter. However, other promoters that are functional in bacteria (such as other known bacterial or phage promoters) are suitable as well. Their nucleotide sequences have been published, thereby enabling a skilled worker operably to ligate them to cistrons encoding the target light and heavy chains (Siebenlist et al. (1980) Cell 20: 269) using linkers or adaptors to supply any required restriction sites.

[0574] In one aspect of the invention, each cistron within the recombinant vector comprises a secretion signal sequence component that directs translocation of the expressed polypeptides across a membrane. In general, the signal sequence may be a component of the vector, or it may be a part of the target polypeptide DNA that is inserted into the vector. The signal sequence selected for the purpose of this invention should be one that is recognized and processed (i.e. cleaved by a signal peptidase) by the host cell. For prokaryotic host cells that do not recognize and process the signal sequences native to the heterologous polypeptides, the signal sequence is substituted by a prokaryotic signal sequence selected, for example, from the group consisting of the alkaline phosphatase, penicillinase, Ipp, or heat-stable enterotoxin II (STII) leaders, LamB, PhoE, PelB, OmpA and MBP. In one embodiment of the invention, the signal sequences used in both cistrons of the expression system are STII signal sequences or variants thereof.

[0575] In another aspect, the production of the immunoglobulins according to the invention can occur in the cytoplasm of the host cell, and therefore does not require the presence of secretion signal sequences within each cistron. In that regard, immunoglobulin light and heavy chains are expressed, folded and assembled to form functional immunoglobulins within the cytoplasm. Certain host strains (e.g., the E. coli trxB-strains) provide cytoplasm conditions that are favorable for disulfide bond formation, thereby permitting proper folding and assembly of expressed protein subunits. Proba and Pluckthun. Gene, 159:203 (1995).

[0576] Prokaryotic host cells suitable for expressing antibodies of the invention include Archaebacteria and Eubacteria, such as Gram-negative or Gram-positive organisms. Examples of useful bacteria include Escherichia (e.g., E. coli), Bacilli (e.g., B. subtilis), Enterobacteria, Pseudomonas species (e.g., P. aeruginosa), Salmonella typhimurium, Serratia marcescans, Klebsiella, Proteus, Shigella, Rhizobia, Vitreoscilla, or Paracoccus. In one embodiment, gram-negative cells are used. In one embodiment, E. coli cells are used as hosts for the invention. Examples of E. coli strains include strain W3110 (Bachmann, Cellular and Molecular Biology, vol. 2 (Washington, D.C.: American Society for Microbiology, 1987), pp. 1190-1219; ATCC® Deposit No. 27,325) and derivatives thereof, including strain 33D3 having genotype W3110 δfhuδ (δtonA) ptr3 lac Iq lacL8 δompTδ (nmpc-fepE) degP41 kanR (U.S. Pat. No. 5,639,635). Other strains and derivatives thereof, such as E. coli 294 (ATCC 31,446), E. coli B, E. coli λ 1776 (ATCC 31,537) and E. coli RV308 (ATCC 31,608) are also suitable. These examples are illustrative rather than limiting. Methods for constructing derivatives of any of the above-mentioned bacteria having defined genotypes are known in the art and described in, for example, Bass et al., Proteins, 8:309-314 (1990). It is generally necessary to select the appropriate bacteria taking into consideration replicability of the replicon in the cells of a bacterium. For example, E. coli, Serratia, or Salmonella species can be suitably used as the host when well known plasmids such as pBR322, pBR325, pACYC177, or pKN410 are used to supply the replicon. Typically the host cell should secrete minimal amounts of proteolytic enzymes, and additional protease inhibitors may desirably be incorporated in the cell culture.

ii. Antibody Production

[0577] Host cells are transformed with the above-described expression vectors and cultured in conventional nutrient media modified as appropriate for inducing promoters, selecting transformants, or amplifying the genes encoding the desired sequences.

[0578] Transformation means introducing DNA into the prokaryotic host so that the DNA is replicable, either as an extrachromosomal element or by chromosomal integrant. Depending on the host cell used, transformation is done using standard techniques appropriate to such cells. The calcium treatment employing calcium chloride is generally used for bacterial cells that contain substantial cell-wall barriers. Another method for transformation employs polyethylene glycol/DMSO. Yet another technique used is electroporation.

[0579] Prokaryotic cells used to produce any one or more of the anti-Notch antibodies of the invention are grown in media known in the art and suitable for culture of the selected host cells. Examples of suitable media include luria broth (LB) plus necessary nutrient supplements. In some embodiments, the media also contains a selection agent, chosen based on the construction of the expression vector, to selectively permit growth of prokaryotic cells containing the expression vector. For example, ampicillin is added to media for growth of cells expressing ampicillin resistant gene.

[0580] Any necessary supplements besides carbon, nitrogen, and inorganic phosphate sources may also be included at appropriate concentrations introduced alone or as a mixture with another supplement or medium such as a complex nitrogen source. Optionally the culture medium may contain one or more reducing agents selected from the group consisting of glutathione, cysteine, cystamine, thioglycollate, dithioerythritol and dithiothreitol.

[0581] The prokaryotic host cells are cultured at suitable temperatures. For E. coli growth, for example, the preferred temperature ranges from about 20° C. to about 39° C., more preferably from about 25° C. to about 37° C., even more preferably at about 30° C. The pH of the medium may be any pH ranging from about 5 to about 9, depending mainly on the host organism. For E. coli, the pH is preferably from about 6.8 to about 7.4, and more preferably about 7.0.

[0582] If an inducible promoter is used in the expression vector of the invention, protein expression is induced under conditions suitable for the activation of the promoter. In one aspect of the invention, PhoA promoters are used for controlling transcription of the polypeptides. Accordingly, the transformed host cells are cultured in a phosphate-limiting medium for induction. Preferably, the phosphate-limiting medium is the C.R.A.P medium (see, e.g., Simmons et al., J. Immunol. Methods (2002), 263:133-147). A variety of other inducers may be used, according to the vector construct employed, as is known in the art.

[0583] In one embodiment, the expressed polypeptides of the present invention are secreted into and recovered from the periplasm of the host cells. Protein recovery typically involves disrupting the microorganism, generally by such means as osmotic shock, sonication or lysis. Once cells are disrupted, cell debris or whole cells may be removed by centrifugation or filtration. The proteins may be further purified, for example, by affinity resin chromatography. Alternatively, proteins can be transported into the culture media and isolated therein. Cells may be removed from the culture and the culture supernatant being filtered and concentrated for further purification of the proteins produced. The expressed polypeptides can be further isolated and identified using commonly known methods such as polyacrylamide gel electrophoresis (PAGE) and Western blot assay.

[0584] Another aspect of the invention contemplates antibody production in large quantity by a fermentation process. Various large-scale fed-batch fermentation procedures are available for production of recombinant proteins. Large-scale fermentations have at least 1000 liters of capacity, preferably about 1,000 to 100,000 liters of capacity. These fermentors use agitator impellers to distribute oxygen and nutrients, especially glucose (the preferred carbon/energy source). Small scale fermentation refers generally to fermentation in a fermentor that is no more than approximately 100 liters in volumetric capacity, and can range from about 1 liter to about 100 liters.

[0585] In a fermentation process, induction of protein expression is typically initiated after the cells have been grown under suitable conditions to a desired density, e.g., an OD550 of about 180-220, at which stage the cells are in the early stationary phase. A variety of inducers may be used, according to the vector construct employed, as is known in the art and described above. Cells may be grown for shorter periods prior to induction. Cells are usually induced for about 12-50 hours, although longer or shorter induction time may be used.

[0586] To improve the production yield and quality of the polypeptides of the invention, various fermentation conditions can be modified. For example, to improve the proper assembly and folding of the secreted antibody polypeptides, additional vectors overexpressing chaperone proteins, such as Dsb proteins (DsbA, DsbB, DsbC, DsbD and or DsbG) or FkpA (a peptidylprolyl cis, trans-isomerase with chaperone activity) can be used to co-transform the host prokaryotic cells. The chaperone proteins have been demonstrated to facilitate the proper folding and solubility of heterologous proteins produced in bacterial host cells. Chen et al. (1999) J Bio Chem 274:19601-19605; Georgiou et al., U.S. Pat. No. 6,083,715; Georgiou et al., U.S. Pat. No. 6,027,888; Bothmann and Pluckthun (2000) J. Biol. Chem. 275:17100-17105; Ramm and Pluckthun (2000) J. Biol. Chem. 275:17106-17113; Arie et al. (2001) Mol. Microbiol. 39:199-210.

[0587] To minimize proteolysis of expressed heterologous proteins (especially those that are proteolytically sensitive), certain host strains deficient for proteolytic enzymes can be used for the present invention. For example, host cell strains may be modified to effect genetic mutation(s) in the genes encoding known bacterial proteases such as Protease III, OmpT, DegP, Tsp, Protease I, Protease Mi, Protease V, Protease VI and combinations thereof Some E. coli protease-deficient strains are available and described in, for example, Joly et al. (1998), supra; Georgiou et al., U.S. Pat. No. 5,264,365; Georgiou et al., U.S. Pat. No. 5,508,192; Hara et al., Microbial Drug Resistance, 2:63-72 (1996).

[0588] In one embodiment, E. coli strains deficient for proteolytic enzymes and transformed with plasmids overexpressing one or more chaperone proteins are used as host cells in the expression system of the invention.

iii. Antibody Purification

[0589] Standard protein purification methods known in the art can be employed. When using recombinant techniques, the antibody can be produced intracellularly, in the periplasmic space, or directly secreted into the medium. If the antibody is produced intracellularly, as a first step, the particulate debris, either host cells or lysed fragments, are removed, for example, by centrifugation or ultrafiltration. Carter et al., Bio/Technology 10:163-167 (1992) describe a procedure for isolating antibodies which are secreted to the periplasmic space of E. coli. Briefly, cell paste is thawed in the presence of sodium acetate (pH 3.5), EDTA, and phenylmethylsulfonylfluoride (PMSF) over about 30 min. Cell debris can be removed by centrifugation. Where the antibody is secreted into the medium, supernatants from such expression systems are generally first concentrated using a commercially available protein concentration filter, for example, an Amicofin® or Millipore Pellicon® ultrafiltration unit. A protease inhibitor such as PMSF may be included in any of the foregoing steps to inhibit proteolysis and antibiotics may be included to prevent the growth of adventitious contaminants.

[0590] The following procedures are exemplary of suitable purification procedures: fractionation on immunoaffinity or ion-exchange columns, ethanol precipitation, reverse phase HPLC, chromatography on silica or on a cation-exchange resin such as DEAE, chromatofocusing, SDS-PAGE, ammonium sulfate precipitation, and gel filtration using, for example, Sephadex G-75.

[0591] The suitability of protein A as an affinity ligand depends on the species and isotype of any immunoglobulin Fc domain that is present in the antibody. Protein A can be used to purify antibodies that are based on human γ1, γ2, or γ4 heavy chains (Lindmark et al., J. Immunol. Meth. 62:1-13 (1983)). Protein G is recommended for all mouse isotypes and for human γ3 (Guss et al., EMBO J. 5:15671575 (1986)). The matrix to which the affinity ligand is attached is most often agarose, but other matrices are available. Mechanically stable matrices such as controlled pore glass or poly(styrenedivinyl)benzene allow for faster flow rates and shorter processing times than can be achieved with agarose. Where the antibody comprises a C H3 domain, the Bakerbond ABX®resin (J. T. Baker, Phillipsburg, N.J.) is useful for purification. Other techniques for protein purification such as fractionation on an ion-exchange column, ethanol precipitation, Reverse Phase HPLC, chromatography on silica, chromatography on heparin SEPHAROSE® chromatography on an anion or cation exchange resin (such as a polyaspartic acid column), chromatofocusing, SDS-PAGE, and ammonium sulfate precipitation are also available depending on the antibody to be recovered.

[0592] In one aspect, Protein A immobilized on a solid phase is used for immunoaffinity purification of the full length antibody products of the invention. Protein A is a 41 kD cell wall protein from Staphylococcus aureas which binds with a high affinity to the Fc region of antibodies. Lindmark et al (1983) J. Immunol. Meth. 62:1-13. The solid phase to which Protein A is immobilized is preferably a column comprising a glass or silica surface, more preferably a controlled pore glass column or a silicic acid column. In some applications, the column has been coated with a reagent, such as glycerol, in an attempt to prevent nonspecific adherence of contaminants.

[0593] As the first step of purification, the preparation derived from the cell culture as described above is applied onto the Protein A immobilized solid phase to allow specific binding of the antibody of interest to Protein A. The solid phase is then washed to remove contaminants non-specifically bound to the solid phase. Finally the antibody of interest is recovered from the solid phase by elution.

[0594] Following any preliminary purification step(s), the mixture comprising the antibody of interest and contaminants may be subjected to low pH hydrophobic interaction chromatography using an elution buffer at a pH between about 2.5-4.5, preferably performed at low salt concentrations (e. g., from about 0-0.25M salt).

b. Generating Antibodies Using Eukaryotic Host Cells:

[0595] The vector components generally include, but are not limited to, one or more of the following: a signal sequence, an origin of replication, one or more marker genes, an enhancer element, a promoter, and a transcription termination sequence.

### (i) Signal Sequence Component

[0596] A vector for use in a eukaryotic host cell may also contain a signal sequence or other polypeptide having a specific cleavage site at the N-terminus of the mature protein or polypeptide of interest. The heterologous signal sequence selected preferably is one that is recognized and processed (i.e., cleaved by a signal peptidase) by the host cell. In mammalian cell expression, mammalian signal sequences as well as viral secretory leaders, for example, the herpes simplex gD signal, are available.

[0597] The DNA for such precursor region is ligated in reading frame to DNA encoding the antibody.

### (ii) Origin of Replication

[0598] Generally, an origin of replication component is not needed for mammalian expression vectors. For example, the SV40 origin may typically be used only because it contains the early promoter.

(iii) Selection Gene Component

[0599] Expression and cloning vectors may contain a selection gene, also termed a selectable marker. Typical selection genes encode proteins that (a) confer resistance to antibiotics or other toxins, e.g., ampicillin, neomycin, methotrexate, or tetracycline, (b) complement auxotrophic deficiencies, where relevant, or (c) supply critical nutrients not available from complex media.

[0600] One example of a selection scheme utilizes a drug to arrest growth of a host cell. Those cells that are successfully transformed with a heterologous gene produce a protein conferring drug resistance and thus survive the selection regimen. Examples of such dominant selection use the drugs neomycin, mycophenolic acid and hygromycin.

[0601] Another example of suitable selectable markers for mammalian cells are those that enable the identification of cells competent to take up the antibody nucleic acid, such as DHFR, thymidine kinase, metallothionein-I and -II, preferably primate metallothionein genes, adenosine deaminase, ornithine decarboxylase, etc.

[0602] For example, cells transformed with the DHFR selection gene are first identified by culturing all of the transformants in a culture medium that contains methotrexate (Mtx), a competitive antagonist of DHFR. An appropriate host cell when wild-type DHFR is employed is the Chinese hamster ovary (CHO) cell line deficient in DHFR activity (e.g., ATCC CRL-9096).

[0603] Alternatively, host cells (particularly wild-type hosts that contain endogenous DHFR) transformed or co-transformed with DNA sequences encoding an antibody, wild-type DHFR protein, and another selectable marker such as aminoglycoside 3′-phosphotransferase (APH) can be selected by cell growth in medium containing a selection agent for the selectable marker such as an aminoglycosidic antibiotic, e.g., kanamycin, neomycin, or G418. See U.S. Pat. No. 4,965,199.

### (iv) Promoter Component

[0604] Expression and cloning vectors usually contain a promoter that is recognized by the host organism and is operably linked to the antibody polypeptide nucleic acid. Promoter sequences are known for eukaryotes. Virtually all eukaryotic genes have an AT-rich region located approximately 25 to 30 bases upstream from the site where transcription is initiated. Another sequence found 70 to 80 bases upstream from the start of transcription of many genes is a CNCAAT region where N may be any nucleotide. At the 3′ end of most eukaryotic genes is an AATAAA sequence that may be the signal for addition of the poly A tail to the 3′ end of the coding sequence. All of these sequences are suitably inserted into eukaryotic expression vectors.

[0605] Antibody polypeptide transcription from vectors in mammalian host cells is controlled, for example, by promoters obtained from the genomes of viruses such as polyoma virus, fowlpox virus, adenovirus (such as Adenovirus 2), bovine papilloma virus, avian sarcoma virus, cytomegalovirus, a retrovirus, hepatitis-B virus and Simian Virus 40 (SV40), from heterologous mammalian promoters, e.g., the actin promoter or an immunoglobulin promoter, from heat-shock promoters, provided such promoters are compatible with the host cell systems.

[0606] The early and late promoters of the SV40 virus are conveniently obtained as an SV40 restriction fragment that also contains the SV40 viral origin of replication. The immediate early promoter of the human cytomegalovirus is conveniently obtained as a HindIII E restriction fragment. A system for expressing DNA in mammalian hosts using the bovine papilloma virus as a vector is disclosed in U.S. Pat. No. 4,419,446. A modification of this system is described in U.S. Pat. No. 4,601,978. Alternatively, the Rous Sarcoma Virus long terminal repeat can be used as the promoter.

### (v) Enhancer Element Component

[0607] Transcription of DNA encoding the antibody polypeptide of this invention by higher eukaryotes is often increased by inserting an enhancer sequence into the vector. Many enhancer sequences are now known from mammalian genes (globin, elastase, albumin, α-fetoprotein, and insulin). Typically, however, one will use an enhancer from a eukaryotic cell virus. Examples include the SV40 enhancer on the late side of the replication origin (bp 100-270), the cytomegalovirus early promoter enhancer, the polyoma enhancer on the late side of the replication origin, and adenovirus enhancers. See also Yaniv, Nature 297:17-18 (1982) on enhancing elements for activation of eukaryotic promoters. The enhancer may be spliced into the vector at a position 5′ or 3′ to the antibody polypeptide-encoding sequence, but is preferably located at a site 5′ from the promoter.

### (vi) Transcription Termination Component

[0608] Expression vectors used in eukaryotic host cells will typically also contain sequences necessary for the termination of transcription and for stabilizing the mRNA. Such sequences are commonly available from the 5′ and, occasionally 3′, untranslated regions of eukaryotic or viral DNAs or cDNAs. These regions contain nucleotide segments transcribed as polyadenylated fragments in the untranslated portion of the mRNA encoding an antibody. One useful transcription termination component is the bovine growth hormone polyadenylation region. See WO94/11026 and the expression vector disclosed therein.

(vii) Selection and Transformation of Host Cells

[0609] Suitable host cells for cloning or expressing the DNA in the vectors herein include higher eukaryote cells described herein, including vertebrate host cells. Propagation of vertebrate cells in culture (tissue culture) has become a routine procedure. Examples of useful mammalian host cell lines are monkey kidney CV1 line transformed by SV40 (COS-7, ATCC CRL 1651); human embryonic kidney line (293 or 293 cells subcloned for growth in suspension culture, Graham et al., J. Gen Virol. 36:59 (1977)); baby hamster kidney cells (BHK, ATCC CCL 10); Chinese hamster ovary cells/-DHFR (CHO, Urlaub et al., Proc. Natl. Acad. Sci. USA 77:4216 (1980)); mouse sertoli cells (TM4, Mather, Biol. Reprod. 23:243-251 (1980); monkey kidney cells (CV1 ATCC CCL 70); African green monkey kidney cells (VERO-76, ATCC CRL-1587); human cervical carcinoma cells (HELA, ATCC CCL 2); canine kidney cells (MDCK, ATCC CCL 34); buffalo rat liver cells (BRL 3A, ATCC CRL 1442); human lung cells (W138, ATCC CCL 75); human liver cells (Hep G2, HB 8065); mouse mammary tumor (MMT 060562, ATCC CCL51); TRI cells (Mather et al., Annals N.Y. Acad. Sci. 383:44-68 (1982)); MRC 5 cells; FS4 cells; and a human hepatoma line (Hep G2).

[0610] Host cells are transformed with the above-described expression or cloning vectors for antibody production and cultured in conventional nutrient media modified as appropriate for inducing promoters, selecting transformants, or amplifying the genes encoding the desired sequences.

(viii) Culturing the Host Cells

[0611] The Suitable host cells for producing an antibody of this invention may be cultured in a variety of media. Commercially available media such as Ham's F10 (Sigma), Minimal Essential Medium ((MEM), (Sigma), RPMI-1640 (Sigma), and Dulbecco's Modified Eagle's Medium ((DMEM), Sigma) are suitable for culturing the host cells. In addition, any of the media described in Ham et al., Meth. Enz. 58:44 (1979), Barnes et al., Anal. Biochem. 102:255 (1980), U.S. Pat. Nos. 4,767,704; 4,657,866; 4,927,762; 4,560,655; or 5,122,469; WO 90/03430; WO 87/00195; or U.S. Pat. Re. 30,985 may be used as culture media for the host cells. Any of these media may be supplemented as necessary with hormones and/or other growth factors (such as insulin, transferrin, or epidermal growth factor), salts (such as sodium chloride, calcium, magnesium, and phosphate), buffers (such as HEPES), nucleotides (such as adenosine and thymidine), antibiotics (such as GENTAMYCIN™ drug), trace elements (defined as inorganic compounds usually present at final concentrations in the micromolar range), and glucose or an equivalent energy source. Any other necessary supplements may also be included at appropriate concentrations that would be known to those skilled in the art. The culture conditions, such as temperature, pH, and the like, are those previously used with the host cell selected for expression, and will be apparent to the ordinarily skilled artisan.

### (ix) Purification of Antibody

[0612] When using recombinant techniques, the antibody can be produced intracellularly, or directly secreted into the medium. If the antibody is produced intracellularly, as a first step, the particulate debris, either host cells or lysed fragments, are removed, for example, by centrifugation or ultrafiltration. Where the antibody is secreted into the medium, supernatants from such expression systems are generally first concentrated using a commercially available protein concentration filter, for example, an Amicon or Millipore Pellicon® ultrafiltration unit. A protease inhibitor such as PMSF may be included in any of the foregoing steps to inhibit proteolysis and antibiotics may be included to prevent the growth of adventitious contaminants.

[0613] The antibody composition prepared from the cells can be purified using, for example, hydroxylapatite chromatography, gel electrophoresis, dialysis, and affinity chromatography, with affinity chromatography being the preferred purification technique. The suitability of protein A as an affinity ligand depends on the species and isotype of any immunoglobulin Fc domain that is present in the antibody. Protein A can be used to purify antibodies that are based on human γ1, γ2, or γ4 heavy chains (Lindmark et al., J. Immunol. Meth. 62:1-13 (1983)). Protein G is recommended for all mouse isotypes and for human γ3 (Guss et al., EMBO J. 5:15671575 (1986)). The matrix to which the affinity ligand is attached is most often agarose, but other matrices are available. Mechanically stable matrices such as controlled pore glass or poly(styrenedivinyl)benzene allow for faster flow rates and shorter processing times than can be achieved with agarose. Where the antibody comprises a CH3 domain, the Bakerbond ABX™ resin (J. T. Baker, Phillipsburg, N.J.) is useful for purification. Other techniques for protein purification such as fractionation on an ion-exchange column, ethanol precipitation, Reverse Phase HPLC, chromatography on silica, chromatography on heparin SEPHAROSE™ chromatography on an anion or cation exchange resin (such as a polyaspartic acid column), chromatofocusing, SDS-PAGE, and ammonium sulfate precipitation are also available depending on the antibody to be recovered.

[0614] Following any preliminary purification step(s), the mixture comprising the antibody of interest and contaminants may be subjected to low pH hydrophobic interaction chromatography using an elution buffer at a pH between about 2.5-4.5, preferably performed at low salt concentrations (e.g., from about 0-0.25 M salt).

### Immunoconjugates

[0615] The invention also pertains to immunoconjugates (interchangeably termed “antibody-drug conjugates” or “ADC”)comprising at least one invention antibody conjugated to a cytotoxic agent such as a chemotherapeutic agent, a growth inhibitory agent, a toxin (e.g., an enzymatically active toxin of bacterial, fungal, plant, or animal origin, or fragments thereof), or a radioactive isotope (i.e., a radioconjugate).

[0616] The use of antibody-drug conjugates for the local delivery of cytotoxic or cytostatic agents, i.e. drugs to kill or inhibit tumor cells in the treatment of cancer (Syrigos and Epenetos (1999) Anticancer Research 19:605-614; Niculescu-Duvaz and Springer (1997) Adv. Drg Del. Rev. 26:151-172; U.S. Pat. No. 4,975,278) allows targeted delivery of the drug moiety to tumors, and intracellular accumulation therein, where systemic administration of these unconjugated drug agents may result in unacceptable levels of toxicity to normal cells as well as the tumor cells sought to be eliminated (Baldwin et al., (1986) Lancet pp. (Mar. 15, 1986):603-05; Thorpe, (1985) “Antibody Carriers Of Cytotoxic Agents In Cancer Therapy: A Review,” in Monoclonal Antibodies '84: Biological And Clinical Applications, A. Pinchera et al. (ed.s), pp. 475-506). Maximal efficacy with minimal toxicity is sought thereby. Both polyclonal antibodies and monoclonal antibodies have been reported as useful in these strategies (Rowland et al., (1986) Cancer Immunol. Immunother., 21:183-87). Drugs used in these methods include daunomycin, doxorubicin, methotrexate, and vindesine (Rowland et al., (1986) supra). Toxins used in antibody-toxin conjugates include bacterial toxins such as diphtheria toxin, plant toxins such as ricin, small molecule toxins such as geldanamycin (Mandler et al (2000) Jour. of the Nat. Cancer Inst. 92(19):1573-1581; Mandler et al (2000) Bioorganic & Med. Chem. Letters 10: 1025-1028; Mandler et al (2002) Bioconjugate Chem. 13:786-791), maytansinoids (EP 1391213; Liu et al., (1996) Proc. Natl. Acad. Sci. USA 93:8618-8623), and calicheamicin (Lode et al (1998) Cancer Res. 58:2928; Hinman et al (1993) Cancer Res. 53:3336-3342). The toxins may effect their cytotoxic and cytostatic effects by mechanisms including tubulin binding, DNA binding, or topoisomerase inhibition. Some cytotoxic drugs tend to be inactive or less active when conjugated to large antibodies or protein receptor ligands.

[0617] ZEVALIN™ (ibritumomab tiuxetan, Biogen/Idec) is an antibody-radioisotope conjugate composed of a murine IgG1 kappa monoclonal antibody directed against the CD20 antigen found on the surface of normal and malignant B lymphocytes and ¹¹¹In or ⁹⁰Y radioisotope bound by a thiourea linker-chelator (Wiseman et al (2000) Eur. Jour. Nucl. Med. 27(7):766-77; Wiseman et al (2002) Blood 99(12):4336-42; Witzig et al (2002) J. Clin. Oncol. 20(10):2453-63; Witzig et al (2002) J. Clin. Oncol. 20(15):3262-69). Although ZEVALIN has activity against B-cell non-Hodgkin's Lymphoma (NHL), administration results in severe and prolonged cytopenias in most patients. MYLOTARG™ (gemtuzumab ozogamicin, Wyeth Pharmaceuticals), an antibody drug conjugate composed of a hu CD33 antibody linked to calicheamicin, was approved in 2000 for the treatment of acute myeloid leukemia by injection (Drugs of the Future (2000) 25(7):686; U.S. Pat. Nos. 4,970,198; 5,079,233; 5,585,089; 5,606,040; 5,693,762; 5,739,116; 5,767,285; 5,773,001). Cantuzumab mertansine (Immunogen, Inc.), an antibody drug conjugate composed of the huC242 antibody linked via the disulfide linker SPP to the maytansinoid drug moiety, DM1, is advancing into Phase II trials for the treatment of cancers that express CanAg, such as colon, pancreatic, gastric, and others. MLN-2704 (Millennium Pharm., BZL Biologics, Immunogen Inc.), an antibody drug conjugate composed of the anti-prostate specific membrane antigen (PSMA) monoclonal antibody linked to the maytansinoid drug moiety, DM1, is under development for the potential treatment of prostate tumors. The auristatin peptides, auristatin E (AE) and monomethylauristatin (MMAE), synthetic analogs of dolastatin, were conjugated to chimeric monoclonal antibodies cBR96 (specific to Lewis Y on carcinomas) and cAC10 (specific to CD30 on hematological malignancies) (Doronina et al (2003) Nature Biotechnology 21(7):778-784) and are under therapeutic development.

[0618] Chemotherapeutic agents useful in the generation of immunoconjugates are described herein (eg., above). Enzymatically active toxins and fragments thereof that can be used include diphtheria A chain, nonbinding active fragments of diphtheria toxin, exotoxin A chain (from Pseudomonas aeruginosa), ricin A chain, abrin A chain, modeccin A chain, alpha-sarcin, Aleurites fordii proteins, dianthin proteins, Phytolaca americana proteins (PAPI, PAPII, and PAP-S), momordica charantia inhibitor, curcin, crotin, sapaonaria officinalis inhibitor, gelonin, mitogellin, restrictocin, phenomycin, enomycin, and the tricothecenes. See, e.g., WO 93/21232 published Oct. 28, 1993. A variety of radionuclides are available for the production of radioconjugated antibodies. Examples include ²¹²Bi, ¹³¹I, ¹³¹In, ⁹⁰Y, and ¹⁸⁶Re. Conjugates of the antibody and cytotoxic agent are made using a variety of bifunctional protein-coupling agents such as N-succinimidyl-3-(2-pyridyldithiol)propionate (SPDP), iminothiolane (IT), bifunctional derivatives of imidoesters (such as dimethyl adipimidate HCl), active esters (such as disuccinimidyl suberate), aldehydes (such as glutaraldehyde), bis-azido compounds (such as bis (p-azidobenzoyl)hexanediamine), bis-diazonium derivatives (such as bis-(p-diazoniumbenzoyl)-ethylenediamine), diisocyanates (such as toluene 2,6-diisocyanate), and bis-active fluorine compounds (such as 1,5-difluoro-2,4-dinitrobenzene). For example, a ricin immunotoxin can be prepared as described in Vitetta et al., Science, 238: 1098 (1987). Carbon-14-labeled 1-isothiocyanatobenzyl-3-methyldiethylene triaminepentaacetic acid (MX-DTPA) is an exemplary chelating agent for conjugation of radionucleotide to the antibody. See WO94/11026.

[0619] Conjugates of an antibody and one or more small molecule toxins, such as a calicheamicin, maytansinoids, dolastatins, aurostatins, a trichothecene, and CC1065, and the derivatives of these toxins that have toxin activity, are also contemplated herein.

i. Maytansine and Maytansinoids

[0620] In some embodiments, the immunoconjugate comprises an antibody (full length or fragments) of the invention conjugated to one or more maytansinoid molecules. Maytansinoids are mitotic inhibitors which act by inhibiting tubulin polymerization. Maytansine was first isolated from the east African shrub Maytenus serrata (U.S. Pat. No. 3,896,111). Subsequently, it was discovered that certain microbes also produce maytansinoids, such as maytansinol and C-3 maytansinol esters (U.S. Pat. No. 4,151,042). Synthetic maytansinol and derivatives and analogues thereof are disclosed, for example, in U.S. Pat. Nos. 4,137,230; 4,248,870; 4,256,746; 4,260,608; 4,265,814; 4,294,757; 4,307,016; 4,308,268; 4,308,269; 4,309,428; 4,313,946; 4,315,929; 4,317,821; 4,322,348; 4,331,598; 4,361,650; 4,364,866; 4,424,219; 4,450,254; 4,362,663; and 4,371,533.

[0621] Maytansinoid drug moieties are attractive drug moieties in antibody drug conjugates because they are: (i) relatively accessible to prepare by fermentation or chemical modification, derivatization of fermentation products, (ii) amenable to derivatization with functional groups suitable for conjugation through the non-disulfide linkers to antibodies, (iii) stable in plasma, and (iv) effective against a variety of tumor cell lines.

[0622] Immunoconjugates containing maytansinoids, methods of making same, and their therapeutic use are disclosed, for example, in U.S. Pat. Nos. 5,208,020, 5,416,064 and European Patent EP 0 425 235 B1, the disclosures of which are hereby expressly incorporated by reference. Liu et al., Proc. Natl. Acad. Sci. USA 93:8618-8623 (1996) described immunoconjugates comprising a maytansinoid designated DM1 linked to the monoclonal antibody C242 directed against human colorectal cancer. The conjugate was found to be highly cytotoxic towards cultured colon cancer cells, and showed antitumor activity in an in vivo tumor growth assay. Chari et al., Cancer Research 52:127-131 (1992) describe immunoconjugates in which a maytansinoid was conjugated via a disulfide linker to the murine antibody A7 binding to an antigen on human colon cancer cell lines, or to another murine monoclonal antibody TA.1 that binds the HER-2/neu oncogene. The cytotoxicity of the TA.1-maytansinoid conjugate was tested in vitro on the human breast cancer cell line SK-BR-3, which expresses 3.times.10⁵ HER-2 surface antigens per cell. The drug conjugate achieved a degree of cytotoxicity similar to the free maytansinoid drug, which could be increased by increasing the number of maytansinoid molecules per antibody molecule. The A7-maytansinoid conjugate showed low systemic cytotoxicity in mice.

[0623] Antibody-maytansinoid conjugates are prepared by chemically linking an antibody to a maytansinoid molecule without significantly diminishing the biological activity of either the antibody or the maytansinoid molecule. See, e.g., U.S. Pat. No. 5,208,020 (the disclosure of which is hereby expressly incorporated by reference). An average of 3-4 maytansinoid molecules conjugated per antibody molecule has shown efficacy in enhancing cytotoxicity of target cells without negatively affecting the function or solubility of the antibody, although even one molecule of toxin/antibody would be expected to enhance cytotoxicity over the use of naked antibody. Maytansinoids are well known in the art and can be synthesized by known techniques or isolated from natural sources. Suitable maytansinoids are disclosed, for example, in U.S. Pat. No. 5,208,020 and in the other patents and nonpatent publications referred to hereinabove. Preferred maytansinoids are maytansinol and maytansinol analogues modified in the aromatic ring or at other positions of the maytansinol molecule, such as various maytansinol esters.

[0624] There are many linking groups known in the art for making antibody-maytansinoid conjugates, including, for example, those disclosed in U.S. Pat. No. 5,208,020 or EP Patent 0 425 235 B1, Chari et al., Cancer Research 52:127-131 (1992), and U.S. patent application Ser. No. 10/960,602, filed Oct. 8, 2004, the disclosures of which are hereby expressly incorporated by reference. Antibody-maytansinoid conjugates comprising the linker component SMCC may be prepared as disclosed in U.S. patent application Ser. No. 10/960,602, filed Oct. 8, 2004. The linking groups include disulfide groups, thioether groups, acid labile groups, photolabile groups, peptidase labile groups, or esterase labile groups, as disclosed in the above-identified patents, disulfide and thioether groups being preferred. Additional linking groups are described and exemplified herein.

[0625] Conjugates of the antibody and maytansinoid may be made using a variety of bifunctional protein coupling agents such as N-succinimidyl-3-(2-pyridyldithio)propionate (SPDP), succinimidyl-4-(N-maleimidomethyl)cyclohexane-1-carboxylate (SMCC), iminothiolane (IT), bifunctional derivatives of imidoesters (such as dimethyl adipimidate HCl), active esters (such as disuccinimidyl suberate), aldehydes (such as glutaraldehyde), bis-azido compounds (such as bis(p-azidobenzoyl)hexanediamine), bis-diazonium derivatives (such as bis-(p-diazoniumbenzoyl)-ethylenediamine), diisocyanates (such as toluene 2,6-diisocyanate), and bis-active fluorine compounds (such as 1,5-difluoro-2,4-dinitrobenzene). Particularly preferred coupling agents include N-succinimidyl-3-(2-pyridyldithio)propionate (SPDP) (Carlsson et al., Biochem. J. 173:723-737 (1978)) and N-succinimidyl-4-(2-pyridylthio)pentanoate (SPP) to provide for a disulfide linkage.

[0626] The linker may be attached to the maytansinoid molecule at various positions, depending on the type of the link. For example, an ester linkage may be formed by reaction with a hydroxyl group using conventional coupling techniques. The reaction may occur at the C-3 position having a hydroxyl group, the C-14 position modified with hydroxymethyl, the C-15 position modified with a hydroxyl group, and the C-20 position having a hydroxyl group. In a preferred embodiment, the linkage is formed at the C-3 position of maytansinol or a maytansinol analogue.

ii. Auristatins and Dolastatins

[0627] In some embodiments, the immunoconjugate comprises an antibody of the invention conjugated to dolastatins or dolostatin peptidic analogs and derivatives, the auristatins (U.S. Pat. Nos. 5,635,483; 5,780,588). Dolastatins and auristatins have been shown to interfere with microtubule dynamics, GTP hydrolysis, and nuclear and cellular division (Woyke et al (2001) Antimicrob. Agents and Chemother. 45(12):3580-3584) and have anticancer (U.S. Pat. No. 5,663,149) and antifungal activity (Pettit et al (1998) Antimicrob. Agents Chemother. 42:2961-2965). The dolastatin or auristatin drug moiety may be attached to the antibody through the N (amino) terminus or the C (carboxyl) terminus of the peptidic drug moiety (WO 02/088172).

[0628] Exemplary auristatin embodiments include the N-terminus linked monomethylauristatin drug moieties DE and DF, disclosed in “Monomethylvaline Compounds Capable of Conjugation to Ligands”, U.S. Ser. No. 10/983,340, filed Nov. 5, 2004, the disclosure of which is expressly incorporated by reference in its entirety.

[0629] Typically, peptide-based drug moieties can be prepared by forming a peptide bond between two or more amino acids and/or peptide fragments. Such peptide bonds can be prepared, for example, according to the liquid phase synthesis method (see E. Schroder and K. Lubke, “The Peptides”, volume 1, pp 76-136, 1965, Academic Press) that is well known in the field of peptide chemistry. The auristatin/dolastatin drug moieties may be prepared according to the methods of: U.S. Pat. No. 5,635,483; U.S. Pat. No. 5,780,588; Pettit et al (1989) J. Am. Chem. Soc. 111:5463-5465; Pettit et al (1998) Anti-Cancer Drug Design 13:243-277; Pettit, G. R., et al. Synthesis, 1996, 719-725; and Pettit et al (1996) J. Chem. Soc. Perkin Trans. 1 5:859-863. See also Doronina (2003) Nat Biotechnol 21(7):778-784; “Monomethylvaline Compounds Capable of Conjugation to Ligands”, U.S. Ser. No. 10/983,340, filed Nov. 5, 2004, hereby incorporated by reference in its entirety (disclosing, e.g., linkers and methods of preparing monomethylvaline compounds such as MMAE and MMAF conjugated to linkers).

iii. Calicheamicin

[0630] In other embodiments, the immunoconjugate comprises an antibody of the invention conjugated to one or more calicheamicin molecules. The calicheamicin family of antibiotics are capable of producing double-stranded DNA breaks at sub-picomolar concentrations. For the preparation of conjugates of the calicheamicin family, see U.S. Pat. Nos. 5,712,374, 5,714,586, 5,739,116, 5,767,285, 5,770,701, 5,770,710, 5,773,001, 5,877,296 (all to American Cyanamid Company). Structural analogues of calicheamicin which may be used include, but are not limited to γ₁^{I}, α₂^{I}, α₃^{I}, N-acetyl-γ₁^{I}, PSAG and θ^{I}₁ (Hinman et al., Cancer Research 53:3336-3342 (1993), Lode et al., Cancer Research 58:2925-2928 (1998) and the aforementioned U.S. patents to American Cyanamid). Another anti-tumor drug that the antibody can be conjugated is QFA which is an antifolate. Both calicheamicin and QFA have intracellular sites of action and do not readily cross the plasma membrane. Therefore, cellular uptake of these agents through antibody mediated internalization greatly enhances their cytotoxic effects.

iv. Other Cytotoxic Agents

[0631] Other antitumor agents that can be conjugated to the antibodies of the invention include BCNU, streptozoicin, vincristine and 5-fluorouracil, the family of agents known collectively LL-E33288 complex described in U.S. Pat. Nos. 5,053,394, 5,770,710, as well as esperamicins (U.S. Pat. No. 5,877,296).

[0632] Enzymatically active toxins and fragments thereof which can be used include diphtheria A chain, nonbinding active fragments of diphtheria toxin, exotoxin A chain (from Pseudomonas aeruginosa), ricin A chain, abrin A chain, modeccin A chain, alpha-sarcin, Aleurites fordii proteins, dianthin proteins, Phytolaca americana proteins (PAPI, PAPII, and PAP-S), momordica charantia inhibitor, curcin, crotin, sapaonaria officinalis inhibitor, gelonin, mitogellin, restrictocin, phenomycin, enomycin and the tricothecenes. See, for example, WO 93/21232 published Oct. 28, 1993.

[0633] Procedures for conjugating the biological agents with the cytotoxic agents have been previously described. Procedures for conjugating chlorambucil with antibodies are described by Flechner, I, European Journal of Cancer, 9:741-745 (1973); Ghose, T. et al., British Medical Journal, 3:495-499 (1972); and Szekerke, M., et al., Neoplasma, 19:211-215 (1972), which are hereby incorporated by reference. Procedures for conjugating daunomycin and adriamycin to antibodies are described by Hurwitz, E. et al., Cancer Research, 35:1175-1181 (1975) and Arnon, R. et al. Cancer Surveys, 1:429-449 (1982), which are hereby incorporated by reference. Procedures for preparing antibody-ricin conjugates are described in U.S. Pat. No. 4,414,148 and by Osawa, T., et al. Cancer Surveys, 1:373-388 (1982) and the references cited therein, which are hereby incorporated by reference. Coupling procedures are also described in EP 86309516.2, which is hereby incorporated by reference.

[0634] The present invention further contemplates an immunoconjugate formed between an antibody and a compound with nucleolytic activity (e.g., a ribonuclease or a DNA endonuclease such as a deoxyribonuclease; DNase).

[0635] For selective destruction of the tumor, the antibodies of the invention can be coupled to high energy radiation emitters, for example, a radioisotope, such as ¹³¹I, a γ-emitter, which, when localized at the tumor site, results in a killing of several cell diameters. See, e.g., S. E. Order, “Analysis, Results, and Future Prospective of the Therapeutic Use of Radiolabeled Antibody in Cancer Therapy”, Monoclonal Antibodies for Cancer Detection and Therapy, R. W. Baldwin et al. (eds.), pp 303-316 (Academic Press 1985), which is hereby incorporated by reference. A variety of radioactive isotopes are available for the production of radioconjugated antibodies. Examples include At₂₁₁, I¹³¹, I¹²⁵, Y⁹⁰, Re^{186,} Re¹⁸⁸, Sm¹⁵³, Bi²¹², P³², Pb²¹² and radioactive isotopes of Lu. When the conjugate is used for detection, it may comprise a radioactive atom for scintigraphic studies, for example tc⁹⁹m or I¹²³, or a spin label for nuclear magnetic resonance (NMR) imaging (also known as magnetic resonance imaging, MRI), such as iodine-123 again, iodine-131, indium-111, fluorine-19, carbon-13, nitrogen-15, oxygen-17, gadolinium, manganese or iron.

[0636] The radio- or other labels may be incorporated in the conjugate in known ways. For example, the peptide may be biosynthesized or may be synthesized by chemical amino acid synthesis using suitable amino acid precursors involving, for example, fluorine-19 in place of hydrogen. Labels such as tc⁹⁹m or I¹²³, Re¹⁸⁶, Re¹⁸⁸ and In¹¹¹ can be attached via a cysteine residue in the peptide. Yttrium-90 can be attached via a lysine residue. The IODOGEN method (Fraker et al (1978) Biochem. Biophys. Res. Commun. 80: 49-57) can be used to incorporate iodine-123. “Monoclonal Antibodies in Immunoscintigraphy” (Chatal, CRC Press 1989) describes other methods in detail.

[0637] Conjugates of the antibody and cytotoxic agent may be made using a variety of bifunctional protein coupling agents such as N-succinimidyl-3-(2-pyridyldithio)propionate (SPDP), succinimidyl-4-(N-maleimidomethyl)cyclohexane-1-carboxylate (SMCC), iminothiolane (IT), bifunctional derivatives of imidoesters (such as dimethyl adipimidate HCl), active esters (such as disuccinimidyl suberate), aldehydes (such as glutaraldehyde), bis-azido compounds (such as bis (p-azidobenzoyl)hexanediamine), bis-diazonium derivatives (such as bis-(p-diazoniumbenzoyl)-ethylenediamine), diisocyanates (such as toluene 2,6-diisocyanate), and bis-active fluorine compounds (such as 1,5-difluoro-2,4-dinitrobenzene). For example, a ricin immunotoxin can be prepared as described in Vitetta et al., Science 238:1098 (1987). Carbon-14-labeled 1-isothiocyanatobenzyl-3-methyldiethylene triaminepentaacetic acid (MX-DTPA) is an exemplary chelating agent for conjugation of radionucleotide to the antibody. See WO94/11026. The linker may be a “cleavable linker” facilitating release of the cytotoxic drug in the cell, For example, an acid-labile linker, peptidase-sensitive linker, photolabile linker, dimethyl linker or disulfide-containing linker (Chari et al., Cancer Research 52:127-131 (1992); U.S. Pat. No. 5,208,020) may be used.

[0638] The compounds of the invention expressly contemplate, but are not limited to, ADC prepared with cross-linker reagents: BMPS, EMCS, GMBS, HBVS, LC-SMCC, MBS, MPBH, SBAP, SIA, SIAB, SMCC, SMPB, SMPH, sulfo-EMCS, sulfo-GMBS, sulfo-KMUS, sulfo-MBS, sulfo-SIAB, sulfo-SMCC, and sulfo-SMPB, and SVSB (succinimidyl-(4-vinylsulfone)benzoate) which are commercially available (e.g., from Pierce Biotechnology, Inc., Rockford, Ill., U.S.A). See pages 467-498, 2003-2004 Applications Handbook and Catalog.

v. Preparation of Antibody Drug Conjugates

[0639] In the antibody drug conjugates (ADC) of the invention, an antibody (Ab) is conjugated to one or more drug moieties (D), e.g. about 1 to about 20 drug moieties per antibody, through a linker (L). The ADC of Formula I may be prepared by several routes, employing organic chemistry reactions, conditions, and reagents known to those skilled in the art, including: (1) reaction of a nucleophilic group of an antibody with a bivalent linker reagent, to form Ab-L, via a covalent bond, followed by reaction with a drug moiety D; and (2) reaction of a nucleophilic group of a drug moiety with a bivalent linker reagent, to form D-L, via a covalent bond, followed by reaction with the nucleophilic group of an antibody. Additional methods for preparing ADC are described herein.

### Ab-(L-D)ₚ I

[0640] The linker may be composed of one or more linker components. Exemplary linker components include 6-maleimidocaproyl (“MC”), maleimidopropanoyl (“MP”), valine-citrulline (“val-cit”), alanine-phenylalanine (“ala-phe”), p-aminobenzyloxycarbonyl (“PAB”), N-Succinimidyl 4-(2-pyridylthio) pentanoate (“SPP”), N-Succinimidyl 4-(N-maleimidomethyl)cyclohexane-1 carboxylate (“SMCC”), and N-Succinimidyl (4-iodo-acetyl)aminobenzoate (“SIAB”). Additional linker components are known in the art and some are described herein. See also “Monomethylvaline Compounds Capable of Conjugation to Ligands”, U.S. Ser. No. 10/983,340, filed Nov. 5, 2004, the contents of which are hereby incorporated by reference in its entirety.

[0641] In some embodiments, the linker may comprise amino acid residues. Exemplary amino acid linker components include a dipeptide, a tripeptide, a tetrapeptide or a pentapeptide. Exemplary dipeptides include: valine-citrulline (vc or val-cit), alanine-phenylalanine (af or ala-phe). Exemplary tripeptides include: glycine-valine-citrulline (gly-val-cit) and glycine-glycine-glycine (gly-gly-gly). Amino acid residues which comprise an amino acid linker component include those occurring naturally, as well as minor amino acids and non-naturally occurring amino acid analogs, such as citrulline. Amino acid linker components can be designed and optimized in their selectivity for enzymatic cleavage by a particular enzyme, for example, a tumor-associated protease, cathepsin B, C and D, or a plasmin protease.

[0642] Nucleophilic groups on antibodies include, but are not limited to: (i) N-terminal amine groups, (ii) side chain amine groups, e.g. lysine, (iii) side chain thiol groups, e.g. cysteine, and (iv) sugar hydroxyl or amino groups where the antibody is glycosylated. Amine, thiol, and hydroxyl groups are nucleophilic and capable of reacting to form covalent bonds with electrophilic groups on linker moieties and linker reagents including: (i) active esters such as NHS esters, HOBt esters, haloformates, and acid halides; (ii) alkyl and benzyl halides such as haloacetamides; (iii) aldehydes, ketones, carboxyl, and maleimide groups. Certain antibodies have reducible interchain disulfides, i.e. cysteine bridges. Antibodies may be made reactive for conjugation with linker reagents by treatment with a reducing agent such as DTT (dithiothreitol). Each cysteine bridge will thus form, theoretically, two reactive thiol nucleophiles. Additional nucleophilic groups can be introduced into antibodies through the reaction of lysines with 2-iminothiolane (Traut's reagent) resulting in conversion of an amine into a thiol. Reactive thiol groups may be introduced into the antibody (or fragment thereof) by introducing one, two, three, four, or more cysteine residues (e.g., preparing mutant antibodies comprising one or more non-native cysteine amino acid residues).

[0643] Antibody drug conjugates of the invention may also be produced by modification of the antibody to introduce electrophilic moieties, which can react with nucleophilic substituents on the linker reagent or drug. The sugars of glycosylated antibodies may be oxidized, e.g. with periodate oxidizing reagents, to form aldehyde or ketone groups which may react with the amine group of linker reagents or drug moieties. The resulting imine Schiff base groups may form a stable linkage, or may be reduced, e.g. by borohydride reagents to form stable amine linkages. In one embodiment, reaction of the carbohydrate portion of a glycosylated antibody with either glactose oxidase or sodium meta-periodate may yield carbonyl (aldehyde and ketone) groups in the protein that can react with appropriate groups on the drug (Hermanson, Bioconjugate Techniques). In another embodiment, proteins containing N-terminal serine or threonine residues can react with sodium meta-periodate, resulting in production of an aldehyde in place of the first amino acid (Geoghegan & Stroh, (1992) Bioconjugate Chem. 3:138-146; U.S. Pat. No. 5,362,852). Such aldehyde can be reacted with a drug moiety or linker nucleophile.

[0644] Likewise, nucleophilic groups on a drug moiety include, but are not limited to: amine, thiol, hydroxyl, hydrazide, oxime, hydrazine, thiosemicarbazone, hydrazine carboxylate, and arylhydrazide groups capable of reacting to form covalent bonds with electrophilic groups on linker moieties and linker reagents including: (i) active esters such as NHS esters, HOBt esters, haloformates, and acid halides; (ii) alkyl and benzyl halides such as haloacetamides; (iii) aldehydes, ketones, carboxyl, and maleimide groups.

[0645] Alternatively, a fusion protein comprising the antibody and cytotoxic agent may be made, e.g., by recombinant techniques or peptide synthesis. The length of DNA may comprise respective regions encoding the two portions of the conjugate either adjacent one another or separated by a region encoding a linker peptide which does not destroy the desired properties of the conjugate.

[0646] In yet another embodiment, the antibody may be conjugated to a “receptor” (such streptavidin) for utilization in tumor pre-targeting wherein the antibody-receptor conjugate is administered to the patient, followed by removal of unbound conjugate from the circulation using a clearing agent and then administration of a “ligand” (e.g., avidin) which is conjugated to a cytotoxic agent (e.g., a radionucleotide).

### RNAi

[0647] In certain embodiments, the cytotoxic agent is a gene modifier, e.g, RNAi molecule. Methods for making specific RNAi (RNA interference) nucleic acids are described in the art (see, e.g., U.S. Pat. No. 6,506,559; WO 01/75164; WO 99/32619; Elbashir et al., Nature 411:494-98 (2001); Zhang et al., Curr. Pharm. Biotech. 5:1-7 (2004); Paddison et al., Curr. Opin. Mol. Ther. 5:217-24 (2003).

[0648] RNA interference refers to the process of sequence-specific post transcriptional gene silencing in animals mediated by short interfering RNAs (siRNA) (Fire et al., 1998, Nature, 391, 806). The corresponding process in plants is commonly referred to as post transcriptional gene silencing or RNA silencing and is also referred to as quelling in fungi. The process of post transcriptional gene silencing is thought to be an evolutionarily conserved cellular defense mechanism used to prevent the expression of foreign genes which is commonly shared by diverse flora and phyla (Fire et al., 1999, Trends Genet., 15, 358). Such protection from foreign gene expression may have evolved in response to the production of double stranded RNAs (dsRNA) derived from viral infection or the random integration of transposon elements into a host genome via a cellular response that specifically destroys homologous single stranded RNA or viral genomic RNA. The presence of dsRNA in cells triggers the RNAi response though a mechanism that has yet to be fully characterized. This mechanism appears to be different from the interferon response that results from dsRNA mediated activation of protein kinase PKR and 2′,5′-oligoadenylate synthetase resulting in non-specific cleavage of mRNA by ribonuclease L.

[0649] The presence of long dsRNAs in cells stimulates the activity of a ribonuclease III enzyme referred to as dicer. Dicer is involved in the processing of the dsRNA into short pieces of dsRNA known as short interfering RNAs (siRNA) (Berstein et al., 2001, Nature, 409, 363). Short interfering RNAs derived from dicer activity are typically about 21-23 nucleotides in length and comprise about 19 base pair duplexes. Dicer has also been implicated in the excision of 21 and 22 nucleotide small temporal RNAs (stRNA) from precursor RNA of conserved structure that are implicated in translational control (Hutvagner et al., 2001, Science, 293, 834). The RNAi response also features an endonuclease complex containing a siRNA, commonly referred to as an RNA-induced silencing complex (RISC), which mediates cleavage of single stranded RNA having sequence complementary to the antisense strand of the siRNA duplex. Cleavage of the target RNA takes place in the middle of the region complementary to the antisense strand of the siRNA duplex (Elbashir et al., 2001, Genes Dev., 15, 188).

### Pharmaceutical Formulations

[0650] Therapeutic formulations comprising an antibody of the invention are prepared for storage by mixing the antibody having the desired degree of purity with optional physiologically acceptable carriers, excipients or stabilizers (Remington: The Science and Practice of Pharmacy 20th edition (2000)), in the form of aqueous solutions, lyophilized or other dried formulations. Acceptable carriers, excipients, or stabilizers are nontoxic to recipients at the dosages and concentrations employed, and include buffers such as phosphate, citrate, histidine and other organic acids; antioxidants including ascorbic acid and methionine; preservatives (such as octadecyldimethylbenzyl ammonium chloride; hexamethonium chloride; benzalkonium chloride, benzethonium chloride; phenol, butyl or benzyl alcohol; alkyl parabens such as methyl or propyl paraben; catechol; resorcinol; cyclohexanol; 3-pentanol; and m-cresol); low molecular weight (less than about 10 residues) polypeptides; proteins, such as serum albumin, gelatin, or immunoglobulins; hydrophilic polymers such as polyvinylpyrrolidone; amino acids such as glycine, glutamine, asparagine, histidine, arginine, or lysine; monosaccharides, disaccharides, and other carbohydrates including glucose, mannose, or dextrins; chelating agents such as EDTA; sugars such as sucrose, mannitol, trehalose or sorbitol; salt-forming counter-ions such as sodium; metal complexes (e.g., Zn-protein complexes); and/or non-ionic surfactants such as TWEEN™, PLURONICS™ or polyethylene glycol (PEG).

[0651] The formulation herein may also contain more than one active compound as necessary for the particular indication being treated, preferably those with complementary activities that do not adversely affect each other. Such molecules are suitably present in combination in amounts that are effective for the purpose intended.

[0652] The active ingredients may also be entrapped in microcapsule prepared, for example, by coacervation techniques or by interfacial polymerization, for example, hydroxymethylcellulose or gelatin-microcapsule and poly-(methylmethacylate) microcapsule, respectively, in colloidal drug delivery systems (for example, liposomes, albumin microspheres, microemulsions, nano-particles and nanocapsules) or in macroemulsions. Such techniques are disclosed in Remington: The Science and Practice of Pharmacy 20th edition (2000).

[0653] The formulations to be used for in vivo administration must be sterile. This is readily accomplished by filtration through sterile filtration membranes.

### Therapeutic and Non-Therapeutic Uses

[0654] Any one or more of the anti-Notch1 antibodies described herein can be used in a method for binding an antigen, preferably Notch1 receptor protein in a subject suffering from a disorder associated with increased antigen expression and/or activity, comprising administering to the subject an antibody of the invention such that the antigen in the subject is bound. Preferably, the antigen is a human protein molecule and the subject is a human subject. Consequently, an antibody of the invention can be administered to a human subject for therapeutic purposes. As well, an antibody of the invention can be administered to a non-human mammal expressing an antigen with which the immunoglobulin cross-reacts (e.g., a primate, pig or mouse) for veterinary purposes or as an animal model of human disease. Regarding the latter, such animal models may be useful for evaluating the therapeutic efficacy of antibodies of the invention (e.g., testing of dosages and time courses of administration).

[0655] The present Notch receptor agonist, antagonist and neutralizing antibodies are useful as therapeutic reagents for treating a Notch receptor expressing cancer or alleviating one or more symptoms of the cancer in a mammal. The antibodies of the invention can also be used to treat other Notch-mediated disorders such as inflamatory disorders etc. The antibody is able to bind to at least a portion of the cancer cells that express a Notch receptor in the mammal and preferably destroy or kill Notch receptor-expressing tumor cells or inhibit the growth of such tumor cells, in vitro, ex vivo or in vivo. Such an antibody include a naked anti-Notch receptor antibody (not conjugated to any agent). Naked antibodies that have cytotoxic or cell growth inhibition properties can be further harnessed with a cytotoxic agent to render them even more potent in tumor cell destruction. Cytotoxic properties can be conferred to an anti-Notch receptor antibody by, e.g., conjugating the antibody with a cytotoxic agent, to form an immunoconjugate as described herein.

[0656] In one aspect, the invention provides methods for treating or preventing a tumor, a cancer, and/or a cell proliferative disorder associated with increased expression and/or activity of Notch1, the methods comprising administering an effective amount of an anti-Notch1 antibody to a subject in need of such treatment.

[0657] In one aspect, the invention provides methods for reducing, inhibiting, blocking, or preventing growth of a tumor or cancer, the methods comprising administering an effective amount of an anti-Notch1 antibody to a subject in need of such treatment.

[0658] In one aspect, the invention provides methods for treating a tumor, a cancer, and/or a cell proliferative disorder comprising administering an effective amount of an anti-Notch1 antibody to a subject in need of such treatment.

[0659] In one aspect, the invention provides methods for inhibiting cellular proliferative disorders including angiogenesis comprising administering an effective amount of an anti-Notch1 antibody to a subject in need of such treatment.

[0660] In one aspect, the invention provides methods for treating a pathological condition associated with a cellular proliferative disorder comprising administering an effective amount of an anti-Notch1 antibody to a subject in need of such treatment. In some embodiments, the pathological condition associated with said cellular proliferative disorder is a tumor and/or cancer.

[0661] The antibodies in accordance with the present invention may be used to deliver a variety of cytotoxic drugs including therapeutic drugs, a compound emitting radiation, molecules of plants, fungal, or bacterial origin, biological proteins, and mixtures thereof. The cytotoxic drugs can be intracellularly acting cytotoxic drugs, such as short-range radiation emitters, including, for example, short-range, high-energy α-emitters.

[0662] The antibodies of the invention can be used to treat, inhibit, delay progression of, prevent/delay recurrence of, ameliorate, or prevent diseases, disorders or conditions associated with expression and/or activity of one or more antigen molecules.

[0663] Exemplary disorders include breast cancer, lung cancer, colorectal cancer, pancreatic cancer, prostate cancer, and head and neck cancer. Also included are Notch-receptor mediated leukemias, disorders involving neovascularization, cadiovascular disease associated with Notch1 polymorphism (US 2006/0134645) and plasma disorders as described in US 2005/0129686.

[0664] In certain embodiments, an immunoconjugate comprising an antibody conjugated with one or more cytotoxic agent(s) is administered to the patient. In some embodiments, the immunoconjugate and/or antigen to which it is bound is/are internalized by the cell, resulting in increased therapeutic efficacy of the immunoconjugate in killing the target cell to which it binds. In one embodiment, the cytotoxic agent targets or interferes with nucleic acid in the target cell. In one embodiment, the cytotoxic agent targets or interferes with microtubule polymerization. Examples of such cytotoxic agents include any of the chemotherapeutic agents noted herein (such as a maytansinoid, auristatin, dolastatin, or a calicheamicin), a radioactive isotope, or a ribonuclease or a RNAi or a DNA endonuclease.

[0665] The anti-Notch1 antibodies or immunoconjugates are administered to a human patient, in accord with known methods, such as intravenous administration, e.g., as a bolus or by continuous infusion over a period of time, by intramuscular, intraperitoneal, intracerobrospinal, subcutaneous, intra-articular, intrasynovial, intrathecal, oral, topical, or inhalation routes. Intravenous or subcutaneous administration of the antibody is preferred.

[0666] Other therapeutic regimens may be combined with the administration of the anti-Notch receptor antibody. The combined administration includes co-administration, using separate formulations or a single pharmaceutical formulation, and consecutive administration in either order, wherein preferably there is a time period while both (or all) active agents simultaneously exert their biological activities. Preferably such combined therapy results in a synergistic therapeutic effect.

[0667] It may also be desirable to combine administration of the anti-Notch receptor antibody or antibodies, with administration of an antibody directed against another tumor antigen associated with the particular cancer. In another embodiment, the invention antibody is a bispecific construct targeting two distinct epitopes. The epitopes may be on the same antigen or on separate antigens, one of which is Notch1 receptor protein.

[0668] Antibodies of the invention can be used either alone or in combination with other compositions in a therapy. For instance, an antibody of the invention may be co-administered with another antibody, chemotherapeutic agent(s) (including cocktails of chemotherapeutic agents), other cytotoxic agent(s), anti-angiogenic agent(s), cytokines, and/or growth inhibitory agent(s). Where an antibody of the invention inhibits tumor growth, it may be particularly desirable to combine it with one or more other therapeutic agent(s) which also inhibits tumor growth, e.g. anti-EGFR agents including antibodies to any one or more of the EGFR family of receptors. Alternatively, or additionally, the patient may receive combined radiation therapy (e.g. external beam irradiation or therapy with a radioactive labeled agent, such as an antibody). Such combined therapies noted above include combined administration (where the two or more agents are included in the same or separate formulations), and separate administration, in which case, administration of the antibody of the invention can occur prior to, and/or following, administration of the adjunct therapy or therapies.

[0669] It is to be further understood that a cocktail of different monoclonal antibodies, such as a mixture of the specific monoclonal antibodies described herein, or their binding fragments, may be administered, if necessary or desired, for cancer treatment. Indeed, using a mixture of monoclonal antibodies, or binding fragments thereof, in a cocktail to target several antigens, or different epitopes, on cancer cells, is an advantageous approach, particularly to prevent evasion of tumor cells and/or cancer cells due to down regulation of one of the antigens.

### Combination Therapies

[0670] As indicated above, the invention provides combined therapies in which an anti-Notch1 antibody is administered with another therapy. For example, anti-Notch1 antibodies are used in combinations with anti-cancer therapeutics or anti-neovascularization therapeutics to treat various neoplastic or non-neoplastic conditions. In one embodiment, the neoplastic or non-neoplastic condition is characterized by pathological disorder associated with aberrant or undesired angiogenesis. The anti-Notch1 antibody can be administered serially or in combination with another agent that is effective for those purposes, either in the same composition or as separate compositions. Alternatively, or additionally, multiple inhibitors of Notch1 can be administered.

[0671] The administration of the anti-Notch1 antibody can be done simultaneously, e.g., as a single composition or as two or more distinct compositions using the same or different administration routes. Alternatively, or additionally, the administration can be done sequentially, in any order. In certain embodiments, intervals ranging from minutes to days, to weeks to months, can be present between the administrations of the two or more compositions. For example, the anti-cancer agent may be administered first, followed by the Notch1 inhibitor. However, simultaneous administration or administration of the anti-Notch1 antibody first is also contemplated.

[0672] The effective amounts of therapeutic agents administered in combination with an anti-Notch1 antibody will be at the physician's or veterinarian's discretion. Dosage administration and adjustment is done to achieve maximal management of the conditions to be treated. The dose will additionally depend on such factors as the type of therapeutic agent to be used and the specific patient being treated. Suitable dosages for the anti-cancer agent are those presently used and can be lowered due to the combined action (synergy) of the anti-cancer agent and the anti-Notch1 antibody. In certain embodiments, the combination of the inhibitors potentiates the efficacy of a single inhibitor. The term “potentiate” refers to an improvement in the efficacy of a therapeutic agent at its common or approved dose. See also the section entitled “Pharmaceutical Compositions” herein.

[0673] Typically, the anti-Notch1 antibodies and anti-cancer agents are suitable for the same or similar diseases to block or reduce a pathological disorder such as tumor growth or growth of a cancer cell. In one embodiment the anti-cancer agent is an anti-angiogenesis agent.

[0674] “Hyper cellular proliferative” therapy in relationship to cancer is a cancer treatment strategy aimed at inhibiting the neoplastic growth of tumor cells expressing the Notch1 receptor protein as well as preventing metastasis of tumors at the secondary sites, therefore allowing attack of the tumors by other therapeutics.

[0675] The anti-Nocth antibodies may also be used in addition to or in conjunction with anti-angiogenic agents that inhibit excessive tumor vascular development. Consequently, hyper-cellular proliferative therapy contemplated herein may be combined with an “antiangiogenic” therapy comprising anti-angiogenic compounds, of which many have been identified and are known in the arts, including those listed herein, e.g., listed under Definitions, and by, e.g., Carmeliet and Jain, Nature 407:249-257 (2000); Ferrara et al., Nature Reviews. Drug Discovery, 3:391-400 (2004); and Sato Int. J. Clin. Oncol., 8:200-206 (2003). See also, US Patent Application US20030055006. In one embodiment, an anti-Notch1 antibody is used in combination with an anti-VEGF neutralizing antibody (or fragment) and/or another VEGF antagonist or a VEGF receptor antagonist including, but not limited to, for example, soluble VEGF receptor (e.g., VEGFR-1, VEGFR-2, VEGFR-3, neuropillins (e.g., NRP1, NRP2)) fragments, aptamers capable of blocking VEGF or VEGFR, neutralizing anti-VEGFR antibodies, low molecule weight inhibitors of VEGFR tyrosine kinases (RTK), antisense strategies for VEGF, ribozymes against VEGF or VEGF receptors, antagonist variants of VEGF; and any combinations thereof. Alternatively, or additionally, two or more angiogenesis inhibitors may optionally be co-administered to the patient in addition to VEGF antagonist and other agent. In certain embodiment, one or more additional therapeutic agents, e.g., anti-cancer agents, can be administered in combination with anti-Notch1 antibody, the VEGF antagonist, and an anti-angiogenesis agent.

[0676] In certain aspects of the invention, other therapeutic agents useful for combination tumor therapy with an anti-Notch1 antibody include other cancer therapies, (e.g., surgery, radiological treatments (e.g., involving irradiation or administration of radioactive substances), chemotherapy, treatment with anti-cancer agents listed herein and known in the art, or combinations thereof). Alternatively, or additionally, two or more antibodies binding the same or two or more different antigens disclosed herein can be co-administered to the patient. Sometimes, it may be beneficial to also administer one or more cytokines to the patient.

[0677] Yet another embodiment provides a method for treating an Notch1 mediated cancer comprising: a) obtaining a sample of diseased tissue from a patient in need of treatment of said cancer; b) determining the level of expression of Notch1 levels in the tissue sample; c) scoring the samples for expression of Notch1 levels; d) correlating the score to identify patients likely to benefit from treatment with an Notch1 antagonist, wherein the step of correlating comprises comparing said scoring to that obtained from a control sample, e) treating the patient with a therapeutic regime known to improve the prognosis for the particular cancer. In certain embodiments, the method further proposes f) repeating steps “a” and “b”, and g) adjusting the therapeutic regime known to improve the prognosis for the cancer; h) repeating steps a-f as frequently as deemed appropriate. Exemplary and non-limiting methods of “detecting” Notch1 expression for staging or scoring purposes is provided herebelow. Refer to, for example, section marked “Detection of Notch1 antigen.”

[0678] Additional combination therapies include combining any one or more of the invention antibodies with glucocorticoids (US 20060003927) and gamma-secretase inhibitors (20080206753 including references cited therein e.g., Lanz, T. A., Hosley, J. D., Adams, W. J., and Merchant, K. M. 2004. Studies of Abeta pharmacodynamics in the brain, cerebrospinal fluid, and plasma in young (plaque-free) Tg2576 mice using the gamma-secretase inhibitor N2-[(2S)-2-(3,5-difluorophenyl)-2-hydroxyethanoyl]-N1-[(7S)-5-methyl-6-ox-o-6,7-dihydro-5H-dibenzo[b,d]azepin-7-yl]-alaninamide (LY-411575). J Pharmacol Exp Ther 309:49-55.)

### Chemotherapeutic Agents

[0679] In certain aspects, the invention provides a method of blocking or reducing tumor growth or growth of a cancer cell, by administering effective amounts of an antagonist of Notch1 and/or an angiogenesis inhibitor(s) and one or more chemotherapeutic agents to a patient susceptible to, or diagnosed with, cancer. A variety of chemotherapeutic agents may be used in the combined treatment methods of the invention. An exemplary and non-limiting list of chemotherapeutic agents contemplated is provided herein under “Definitions.”

[0680] Likewise, in certain aspects, the invention provides for the use of “agonist” anti-Notch1 antibodies.

[0681] As will be understood by those of ordinary skill in the art, the appropriate doses of chemotherapeutic agents will be generally around those already employed in clinical therapies wherein the chemotherapeutics are administered alone or in combination with other chemotherapeutics. Variation in dosage will likely occur depending on the condition being treated. The physician administering treatment will be able to determine the appropriate dose for the individual subject.

[0682] The invention also provides methods and compositions for inhibiting or preventing relapse tumor growth or relapse cancer cell growth. Relapse tumor growth or relapse cancer cell growth is used to describe a condition in which patients undergoing or treated with one or more currently available therapies (e.g., cancer therapies, such as chemotherapy, radiation therapy, surgery, hormonal therapy and/or biological therapy/immunotherapy, anti-VEGF antibody therapy, particularly a standard therapeutic regimen for the particular cancer) is not clinically adequate to treat the patients or the patients are no longer receiving any beneficial effect from the therapy such that these patients need additional effective therapy. As used herein, the phrase can also refer to a condition of the “non-responsive/refractory” patient, e.g., which describe patients who respond to therapy yet suffer from side effects, develop resistance, do not respond to the therapy, do not respond satisfactorily to the therapy, etc. In various embodiments, a cancer is relapse tumor growth or relapse cancer cell growth where the number of cancer cells has not been significantly reduced, or has increased, or tumor size has not been significantly reduced, or has increased, or fails any further reduction in size or in number of cancer cells. The determination of whether the cancer cells are relapse tumor growth or relapse cancer cell growth can be made either in vivo or in vitro by any method known in the art for assaying the effectiveness of treatment on cancer cells, using the art-accepted meanings of “relapse” or “refractory” or “non-responsive” in such a context. A tumor resistant to anti-EGFR treatment is an example of a relapse tumor growth.

[0683] The invention provides methods of blocking or reducing relapse tumor growth or relapse cancer cell growth in a subject by administering one or more anti-Notch1 antibodies to block or reduce the relapse tumor growth or relapse cancer cell growth in subject. In certain embodiments, the Notch1 antagonist or agonist antibodies in accordance with the invention can be administered subsequent to the cancer therapeutic. In certain embodiments, the anti-Notch1 antibodies are administered simultaneously with cancer therapy. Alternatively, or additionally, the anti-Notch1 antibody therapy alternates with another cancer therapy, which can be performed in any order. The invention also encompasses methods for administering one or more inhibitory antibodies to prevent the onset or recurrence of cancer in patients predisposed to having cancer. Generally, the subject was or is concurrently undergoing cancer therapy. In one embodiment, the cancer therapy is treatment with an anti-angiogenesis agent, e.g., a VEGF antagonist. In one embodiment, the anti-angiogenesis agent is an anti-VEGF neutralizing antibody or fragment (e.g. AVASTIN™ (Genentech, South San Francisco, Calif.) or LUCENTIS™ (Genentech, South San Francisco, Calif.)), Y0317, M4, G6, B20, 2C3, etc.). See, e.g., U.S. Pat. Nos. 6,582,959, 6,884,879, 6,703,020; WO98/45332; WO 96/30046; WO94/10202; EP 0666868B1; US Patent Applications 20030206899, 20030190317, 20030203409, and 20050112126; Popkov et al., Journal of Immunological Methods 288:149-164 (2004); and, WO2005012359. Additional agents can be administered in combination with VEGF antagonist and an anti-Notch1 antibody for blocking or reducing relapse tumor growth or relapse cancer cell growth, e.g., see section entitled Combination Therapies herein.

[0684] The antibody of the invention (and adjunct therapeutic agent) is/are administered by any suitable means, including parenteral, subcutaneous, intraperitoneal, intrapulmonary, and intranasal, and, if desired for local treatment, intralesional or intravitreal administration. Parenteral infusions include intramuscular, intravenous, intraarterial, intraperitoneal, or subcutaneous administration. In addition, the antibody is suitably administered by pulse infusion, particularly with declining doses of the antibody. Dosing can be by any suitable route, e.g. by injections, such as intravenous or subcutaneous injections, depending in part on whether the administration is brief or chronic.

[0685] The antibody composition of the invention will be formulated, dosed, and administered in a fashion consistent with good medical practice. Factors for consideration in this context include the particular disorder being treated, the particular mammal being treated, the clinical condition of the individual patient, the cause of the disorder, the site of delivery of the agent, the method of administration, the scheduling of administration, and other factors known to medical practitioners. The antibody need not be, but is optionally formulated with one or more agents currently used to prevent or treat the disorder in question. The effective amount of such other agents depends on the amount of antibodies of the invention present in the formulation, the type of disorder or treatment, and other factors discussed above. These are generally used in the same dosages and with administration routes as used hereinbefore or about from 1 to 99% of the heretofore employed dosages.

[0686] For the prevention or treatment of disease, the appropriate dosage of an antibody of the invention (when used alone or in combination with other agents such as chemotherapeutic agents) will depend on the type of disease to be treated, the type of antibody, the severity and course of the disease, whether the antibody is administered for preventive or therapeutic purposes, previous therapy, the patient's clinical history and response to the antibody, and the discretion of the attending physician. The antibody is suitably administered to the patient at one time or over a series of treatments. Depending on the type and severity of the disease, about 1 μg/kg to 15 mg/kg (e.g. 0.1 mg/kg-10 mg/kg) of antibody is an initial candidate dosage for administration to the patient, whether, for example, by one or more separate administrations, or by continuous infusion. One typical daily dosage might range from about 1 μg/kg to 100 mg/kg or more, depending on the factors mentioned above. For repeated administrations over several days or longer, depending on the condition, the treatment is sustained until a desired suppression of disease symptoms occurs. One exemplary dosage of the antibody would be in the range from about 0.05 mg/kg to about 10 mg/kg. Thus, one or more doses of about 0.5 mg/kg, 2.0 mg/kg, 4.0 mg/kg or 10 mg/kg (or any combination thereof) may be administered to the patient. Such doses may be administered intermittently, e.g. every week or every three weeks (e.g. such that the patient receives from about two to about twenty, e.g. about six doses of the antibody). An initial higher loading dose, followed by one or more lower doses may be administered. An exemplary dosing regimen comprises administering an initial loading dose of about 4 mg/kg, followed by a weekly maintenance dose of about 2 mg/kg of the antibody. However, other dosage regimens may be useful. The progress of this therapy is easily monitored by conventional techniques and assays.

### Detection of Notch1 Antigen

[0687] It is well accepted that cell surface growth receptor proteins, especially those whose expression correlates with an oncogenic disorder, e.g., Notch1 are excellent targets for drug candidates or tumor (e.g., cancer) treatment. The state of the art now concludes that such proteins may also find use in non-therapeutic applications. The exquisite specificity of the anti-Notch antibodies for the Notch1 receptor protein can be exploited for various uses including diagnostic and prognostic reagents. The proposed uses exploit the observation that (i) the anti-Notch1 antibodies of the invention including antigen binding fragments thereof specifically bind Notch1 and (ii) the target receptor bound by the antibodies of the invention is highly expressed on cancerous cells. Expressly contemplated also are the use of the invention antibodies in detecting, monitoring, and quantifying Notch1 expression (e.g. in an ELISA or a Western blot); purification or immunoprecipitation of Notch1 from cells, to kill and eliminate Notch1-expressing cells from a population of mixed cells as a step in the purification of other cells. Proposed methods of diagnosis can be performed in vitro using a cellular sample (e.g.,lymph node biopsy or tissue) from a patient or be performed by in vivo imaging. Diagnostic and prognostic applications include scoring tumors as well as staging Notch1-expressing cancers (e.g., in radioimaging). They may be used alone or in combination with other Notch1 related cancer markers. The diagnostic uses of the antibodies according to the present invention embrace primary tumors and cancers, as well as metastases. Other cancers and tumors bearing the antigen are also amenable to these diagnostic and imaging procedures.

[0688] In one embodiment, the invention antibody or binding fragments thereof will be very useful in cancer diagnosis and prognosis by effectively allowing one skilled in the art to quantitate or quantify the expression levels of Notch1 in whatever kind of “sample” it may occur. This can be achieved, for example, by immunofluorescence techniques employing a fluorescently labeled antibody, coupled with light microscopic, flow cytometric, or fluorometric detection. In addition, the antibodies, or binding fragments thereof, according to the present invention may additionally be employed histologically, as in immunofluorescence, immunoelectron microscopy, or non-immuno assays, for in situ detection of the cancer-specific antigen on cells, such as for use in monitoring, diagnosing, or detection assays. See, for example, Zola, Monoclonal Antibodies: A Manual of Techniques, pp. 147 158 (CRC Press, Inc. 1987).

[0689] In another aspect, the invention provides methods for detection of Notch1, the methods comprising detecting Notch1-anti-Notch1 antibody complex in the sample. The term “detection” as used herein includes qualitative and/or quantitative detection (measuring levels) with or without reference to a control.

[0690] In another aspect, the invention provides methods for diagnosing a disorder associated with Notch1 expression and/or activity, the methods comprising detecting Notch1-anti-Notch1 antibody complex in a biological sample from a patient having or suspected of having the disorder. In some embodiments, the Notch1 expression is increased expression or abnormal (undesired) expression. In some embodiments, the disorder is a tumor, cancer, and/or a cell proliferative disorder.

[0691] In another aspect, the invention provides any of the anti-Notch1 antibodies described herein, wherein the anti-Notch1 antibody comprises a detectable label.

[0692] In another aspect, the invention provides a complex of any of the anti-Notch1 antibodies described herein and Notch1. In some embodiments, the complex is in vivo or in vitro. In some embodiments, the complex comprises a cancer cell. In some embodiments, the anti-Notch1 antibody is detectably labeled.

[0693] Anti-Notch1 antibodies can be used for the detection of Notch1 in any one of a number of well known detection assay methods. For example, a biological sample may be assayed for Notch1 by obtaining the sample from a desired source, admixing the sample with anti-Notch1 antibody to allow the antibody to form antibody/Notch1 complex with any Notch1 present in the mixture, and detecting any antibody/Notch1 complex present in the mixture. The biological sample may be prepared for assay by methods known in the art which are suitable for the particular sample. The methods of admixing the sample with antibodies and the methods of detecting antibody/Notch1 complex are chosen according to the type of assay used. Such assays include immunohistochemistry, competitive and sandwich assays, and steric inhibition assays.

[0694] Analytical methods for Notch1 all use one or more of the following reagents: labeled Notch1 analogue, immobilized Notch1 analogue, labeled anti-Notch1 antibody, immobilized anti-Notch1 antibody and steric conjugates. The labeled reagents also are known as “tracers.”

[0695] For diagnostic and imaging applications, the antibodies of the invention may be labeled. The label used is any detectable functionality that does not interfere with the binding of Notch1 and anti-Notch1 antibody and it can bind to the antibodies by means of physical binding, chemical binding or the like, thus allowing them to be detected. Numerous labels are known for use in immunoassay, examples including moieties that may be detected directly, such as fluorochrome, chemiluminescent, and radioactive labels, as well as moieties, such as enzymes, that must be reacted or derivatized to be detected. Specific examples of labeling substances include enzymes, fluorescent substances, chemiluminescent substances, biotin, avidin, radioactive isotopes and the like. When the fluorescently labeled antibody is exposed to light of the proper wavelength, its presence can then be detected due to fluorescence. The radioactive isotopes and fluorescent substances detailed herein independently produce detectable signals, but the enzymes, chemiluminescent substances, biotin and avidin do not independently produce detectable signals, but instead produce detectable signals when they react with at least one other substance. For example, in the case of an enzyme at least a substrate is required, and a variety of substrates are used depending on the method of measuring enzyme activity (colorimetry, fluorescence method, bioluminescence method or chemoluminescence method). In the case of biotin generally at least avidin or enzyme-modified avidin is reacted. A variety of colorants dependent on the substrate can also be used as necessary.

[0696] Examples of such labels include: Examples of such labels include the radioisotopes ³²P, ¹⁴C, ¹²⁵I ³H, and ¹³¹I, fluorophores such as rare earth chelates or fluorescein and its derivatives, rhodamine and its derivatives, dansyl, umbelliferone, luceriferases, e.g., firefly luciferase and bacterial luciferase (U.S. Pat. No. 4,737,456), luciferin, 2,3-dihydrophthalazinediones, horseradish peroxidase (HRP), alkaline phosphatase, β-galactosidase, glucoamylase, lysozyme, saccharide oxidases, e.g., glucose oxidase, galactose oxidase, and glucose-6-phosphate dehydrogenase, heterocyclic oxidases such as uricase and xanthine oxidase, coupled with an enzyme that employs hydrogen peroxide to oxidize a dye precursor such as HRP, lactoperoxidase, or microperoxidase, biotin/avidin, spin labels, bacteriophage labels, stable free radicals, and the like. The label may be directly conjugated to the antibodies or fragments thereof or indirectly conjugated. Indeed, numerous ways to detectably label protein molecules are known and practiced in the art. Means of indirect conjugation of a protein to a label are also well known. Indirect conjugation of the label to the antibody may, for example, be achieved by conjugating antibody to a small hapten (e.g., digoxin) and one of the different types of labels mentioned herein is conjugated with an anti-hapten antibody mutant (e.g., anti-digoxin antibody). See, e.g., Wagner et al., J. Nucl. Med. 20: 428 (1979) and Saha et al., J. Nucl. Med. 6:542 (1976), hereby incorporated by reference.

[0697] Conventional methods are available to bind these labels covalently to proteins or polypeptides. For instance, coupling agents such as dialdehydes, carbodiimides, dimaleimides, bis-imidates, bis-diazotized benzidine, and the like may be used to tag the antibodies with the above-described fluorescent, chemiluminescent, and enzyme labels. See, for example, U.S. Pat. No. 3,940,475 (fluorimetry) and U.S. Pat. No. 3,645,090 (enzymes); Hunter et al., Nature, 144: 945 (1962); David et al., Biochemistry, 13: 1014-1021 (1974); Pain et al., J. Immunol. Methods, 40: 219-230 (1981); and Nygren, J. Histochem. and Cytochem., 30: 407-412 (1982). Preferred labels herein are enzymes such as horseradish peroxidase and alkaline phosphatase. The conjugation of such label, including the enzymes, to the antibody is a standard manipulative procedure for one of ordinary skill in immunoassay techniques. See, for example, O'Sullivan et al., “Methods for the Preparation of Enzyme-antibody Conjugates for Use in Enzyme Immunoassay,” in Methods in Enzymology, ed. J. J. Langone and H. Van Vunakis, Vol. 73 (Academic Press, New York, N.Y., 1981), pp. 147-166.

[0698] Another way to label the antibodies of the invention is by linking the antibody to an enzyme, e.g., for use in an enzyme immunoassay (EIA), (A. Voller et al., 1978, “The Enzyme Linked Immunosorbent Assay (ELISA)”, Diagnostic Horizons, 2:1 7; Microbiological Associates Quarterly Publication, Walkersville, Md.; A. Voller et al., 1978, J. Clin. Pathol., 31:507 520; J. E. Butler et al., 1981, Meths. Enzymol., 73:482 523; Enzyme Immunoassay, 1980, (Ed.) E. Maggio, CRC Press, Boca Raton, Fla.; Enzyme Immunoassay, 1981, (Eds.) E. Ishikawa et al., Kgaku Shoin, Tokyo, Japan). The enzyme that is bound to the antibody reacts with an appropriate substrate, preferably a chromogenic substrate, so as to produce a chemical moiety which can be detected, for example, by spectrophotometric, fluorometric, or by visual detection means. Nonlimiting examples of enzymes which can be used to detectably label the antibodies include malate dehydrogenase, staphylococcal nuclease, delta-5-steroid isomerase, yeast alcohol dehydrogenase, alpha-glycerophosphate dehydrogenase, triose phosphate isomerase, horseradish peroxidase, alkaline phosphatase, ribonuclease, urease, catalase, glucose-6-phosphate dehydrogenase, glucoamylase and acetylcholinesterase. The detection can be accomplished by calorimetric methods, which employ a chromogenic substrate for the enzyme, or by visual comparison of the extent of enzymatic reaction of a substrate compared with similarly prepared standards or controls. Numerous other enzyme-substrate combinations are available to those skilled in the art. For a general review of these, see U.S. Pat. Nos. 4,275,149 and 4,318,980.

[0699] Techniques for conjugating enzymes to antibodies are described in O′Sullivan et al., Methods for the Preparation of Enzyme-Antibody Conjugates for use in Enzyme Immunoassay, in Methods in Enzym. (ed J. Langone & H. Van Vunakis), Academic press, New York, 73:147-166 (1981).

[0700] Examples of enzyme-substrate combinations include, for example:

[0701] (i) Horseradish peroxidase (HRPO) with hydrogen peroxidase as a substrate, wherein the hydrogen peroxidase oxidizes a dye precursor (e.g., orthophenylene diamine (OPD) or 3,3′,5,5′-tetramethyl benzidine hydrochloride (TMB));

[0702] (ii) alkaline phosphatase (AP) with para-Nitrophenyl phosphate as chromogenic substrate; and

[0703] (iii) β-D-galactosidase (β-D-Gal) with a chromogenic substrate (e.g., p-nitrophenyl-β-D-galactosidase) or fluorogenic substrate 4-methylumbelliferyl-β-D-galactosidase.

[0704] Immobilization of reagents is required for certain assay methods. Immobilization entails separating the anti-Notch1 antibody from any Notch1 that remains free in solution. This conventionally is accomplished by either insolubilizing the anti-Notch1 antibody or Notch1 analogue before the assay procedure, as by adsorption to a water-insoluble matrix or surface (Bennich et al., U.S. Pat. No. 3,720,760), by covalent coupling (for example, using glutaraldehyde cross-linking), or by insolubilizing the anti-Notch1 antibody or Notch1 analogue afterward, e.g., by immunoprecipitation.

[0705] Suitable subjects include those who are suspected of being at risk of a pathological effect of any hyperproliferative oncogenic disorders, particularly carcinoma and sarcomas mediated by Notch1, are suitable for the detection, diagnosis and prognosis paradigms of the invention. Those with a history of cancer are especially suitable. Suitable human subjects for the diagnostic and prognostic therapies may comprise two groups, which can be distinguished by clinical criteria. Patients with “advanced disease” or “high tumor burden” are those who bear a clinically measurable tumor. A clinically measurable tumor is one that can be detected on the basis of tumor mass (e.g., by palpation, CAT scan, or X-Ray; positive biochemical or histopathological markers on their own may be insufficient to identify this population).

[0706] A second group of suitable subjects is known in the art as the “adjuvant group”. These are individuals who have had a history of cancer, but have been responsive to another mode of therapy. The prior therapy may have included, but is not restricted to, surgical resection, radiotherapy, and traditional chemotherapy. As a result, these individuals have no clinically measurable tumor. However, they are suspected of being at risk for progression of the disease, either near the original tumor site, or by metastases.

[0707] This group can be further subdivided into high-risk and low-risk individuals. The subdivision is made on the basis of features observed before or after the initial treatment. These features are known in the clinical arts, and are suitably defined for each different cancer. Features typical of high risk subgroups are those in which the tumor has invaded neighboring tissues, or who show involvement of lymph nodes.

[0708] Another suitable group of subjects is those with a genetic predisposition to cancer but who have not yet evidenced clinical signs of cancer. For instance, women with a family history of breast cancer, but still of childbearing age, may avail themselves of having their breast tissue examined for expression levels of Notch1 and those testing positive, e.g., having higher than normal expression level of Notch1 may wish to be monitored for presenting with breast cancer or alternatively avail themselves of preventive treatment with a conventional Notch1 specific monoclonal therapy.

[0709] A variety of other immunoassays are available for detecting Notch1. For example, by labeling the antibodies, or binding fragments thereof, with a radioisotope, a radioimmunoassay (RIA) can be used to detect cancer-specific antigens (e.g., Current Protocols in Immunology, Volumes 1 and 2, Coligen et al., Ed. Wiley-Interscience, New York, N.Y., Pubs. (19910, Colcher et al., 1981, Cancer Research, 41, 1451 1459; Weintraub, “Principles of Radioimmunoassays”, Seventh Training Course on Radioligand Techniques, The Endocrine Society, March, 1986). The radioactive isotope label can be detected by using a gamma counter or a scintillation counter or by radiography. Representative radioisotopes include ³⁵S, ¹⁴C, ¹²⁵I, ³H, and ¹³¹I. Procedures for labeling biological agents with the radioactive isotopes are generally known in the art. Tritium labeling procedures are described in U.S. Pat. No. 4,302,438, which is hereby incorporated by reference. Iodinating, tritium labeling, and ³⁵S labeling procedures especially adapted for murine monoclonal antibodies are well known. Other procedures for iodinating biological agents, such as antibodies, binding portions thereof, probes, or ligands, are described by Hunter and Greenwood, Nature 144:945 (1962), David et al., Biochemistry 13:1014-1021 (1974), and U.S. Pat. Nos. 3,867,517 and 4,376,110, which are hereby incorporated by reference. Procedures for iodinating biological agents are described by Greenwood, F. et al., Biochem. J. 89:114-123 (1963); Marchalonis, J., Biochem. J. 113:299-305 (1969); and Morrison, M. et al., Immunochemistry, 289-297 (1971), which are hereby incorporated by reference. Procedures for ⁹⁹mTc-labeling are described by Rhodes, B. et al. in Burchiel, S. et al. (eds.), Tumor Imaging: The Radioimmunochemical Detection of Cancer, New York: Masson 111-123 (1982) and the references cited therein, which are hereby incorporated by reference. Procedures suitable for “In-labeling biological agents are described by Hnatowich, D. J. et al., J. Immul. Methods, 65:147-157 (1983), Hnatowich, D. et al., J. Applied Radiation, 35:554-557 (1984), and Buckley, R. G. et al., F.E.B.S. 166:202-204 (1984), which are hereby incorporated by reference.

[0710] The presently universally-accepted method for the diagnosis of solid cancer is the histologic determination of abnormal cellular morphology in surgically biopsied or resected tissue. Once removed, the tissue is preserved in a fixative, embedded in paraffin wax, cut into 5 μm-thick sections, and stained with two dyes: hematoxylin for the nucleus and eosin for the cytoplasm (”H&E staining“). This approach is simple, fast, reliable, and inexpensive. Histopathology allows the diagnosis of a variety of tissue and cell types. By providing an estimation of tumor “Grade” (cellular differentiation/tissue architecture) and “Stage” (depth of organ penetration) it also makes prognosis possible.

[0711] Immunohistochemistry (“IHC”) techniques utilize an antibody to probe and visualize cellular antigens in situ, generally by chromogenic or fluorescent methods. For sample preparation, a tissue or cell sample from a mammal (typically a human patient) may be used. Examples of samples include, but are not limited to, cancer cells such as colon, breast, prostate, ovary, lung, stomach, pancreas, lymphoma, and leukemia cancer cells. The sample can be obtained by a variety of procedures known in the art including, but not limited to surgical excision, aspiration or biopsy. The tissue may be fresh or frozen. In one embodiment, the sample is fixed and embedded in paraffin or the like. The tissue sample may be fixed (i.e. preserved) by conventional methodology. One of ordinary skill in the art will appreciate that the choice of a fixative is determined by the purpose for which the sample is to be histologically stained or otherwise analyzed. One of ordinary skill in the art will also appreciate that the length of fixation depends upon the size of the tissue sample and the fixative used.

[0712] IHC may be performed in combination with additional techniques such as morphological staining and/or fluorescence in-situ hybridization. Two general methods of IHC are available; direct and indirect assays. According to the first assay, binding of antibody to the target antigen (e.g., Notch1) is determined directly. This direct assay uses a labeled reagent, such as a fluorescent tag or an enzyme-labeled primary antibody, which can be visualized without further antibody interaction. In a typical indirect assay, unconjugated primary antibody binds to the antigen and then a labeled secondary antibody binds to the primary antibody. Where the secondary antibody is conjugated to an enzymatic label, a chromogenic or fluorogenic substrate is added to provide visualization of the antigen. Signal amplification occurs because several secondary antibodies may react with different epitopes on the primary antibody.

[0713] The primary and/or secondary antibody used for immunohistochemistry typically will be labeled with a detectable moiety. Numerous labels are available, some of which are detailed herein.

[0714] Aside from the sample preparation procedures discussed above, further treatment of the tissue section prior to, during or following IHC may be desired, for example, epitope retrieval methods, such as heating the tissue sample in citrate buffer may be carried out (see, e.g., Leong et al. Appl. Immunohistochem. 4(3):201 (1996)).

[0715] Following an optional blocking step, the tissue section is exposed to primary antibody for a sufficient period of time and under suitable conditions such that the primary antibody binds to the target protein antigen in the tissue sample. Appropriate conditions for achieving this can be determined by routine experimentation. The extent of binding of antibody to the sample is determined by using any one of the detectable labels discussed above. Preferably, the label is an enzymatic label (e.g. HRPO) which catalyzes a chemical alteration of the chromogenic substrate such as 3,3′-diaminobenzidine chromogen. Preferably the enzymatic label is conjugated to antibody which binds specifically to the primary antibody (e.g. the primary antibody is rabbit polyclonal antibody and secondary antibody is goat anti-rabbit antibody).

[0716] Specimens thus prepared may be mounted and coverslipped. Slide evaluation is then determined, e.g. using a microscope.

[0717] Alternatively, one may also utilize microscope-based cell imaging, which uses conventional light microscopy combined with monochromatic light filters and computer software programs. The wavelengths of the light filters are matched to the colors of the antibody stain and the cell counterstain. The filters allow the microscopist to identify, classify and then measure differences in the optical density of specific colors of light transmitted through immunostained portions of tissue sections. See U.S. Pat. Nos. 5,235,522 and 5,252,487, both of which are incorporated herein by reference, for applications of these methods to tumor protein measurement. Yet other cell imaging systems (image cytometers) permit automated recognition of features, and combine this with automated calculation of feature areas, automated calibration, and automatic calculation of average and integrated (SOD) optical density. (See, e.g., U.S. Pat. Nos. 5,548,661, 5,787,189, both of which are incorporated herein by reference, and references therein.)

[0718] Since immunohistochemical staining of tissue sections has been shown to be a reliable method of assessing or detecting presence of proteins in a sample. Consequently, use of the antibodies described herein to score staining and/or detection levels are also contemplated.

[0719] Protein expression may be determined using a validated scoring method (Dhanasekaran et al., 2001, Nature 412, 822-826; Rubin et al., 2002, supra; Varambally et al., 2002, Nature 419, 624-629) where staining was evaluated for intensity and the percentage of cells staining positive. In cases where benign tissue and cancer are present, only one or the other tissue type is evaluated for purposes of analysis. Any of the methods of the invention may score the analysis by using a scale of 0 to 4, where 0 is negative (no detectable Notch or level of expression same as that of a control sample) and 4 is high intensity staining in the majority of cells. In certain embodiments, the scoring may be used for diagnostic or prognostic purposes. For example, a score of 1, while a positive score, may indicate better prognosis than, say, a score of 3 or 4.

[0720] The information gathered in accordance with the invention will aid the physician in determining a course of treatment for a patient presenting with a Notch-mediated oncogenic disorder. For example, in the case of tumor cells comprising Notch receptor expressing, a low score might dictate that additional intervention, e.g., surgery is not warranted. Typically, a staining pattern score of about 3+ or higher in an IHC assay is diagnostic and/or prognostic. In some embodiments, a staining pattern score of about 1+ or higher is diagnostic and/or prognostic. In other embodiments, a staining pattern score of about 2+ or higher is diagnostic and/or prognostic. It is understood that when cells and/or tissue from a tumor are examined using IHC, staining is generally determined or assessed in tumor cell and/or tissue (as opposed to stromal or surrounding tissue that may be present in the sample).

[0721] Other assay methods, known as competitive or sandwich assays, are well established and widely used in the commercial diagnostics industry.

[0722] Competitive assays rely on the ability of a tracer Notch1 analogue to compete with the test sample Notch1 for a limited number of anti-Notch1 antibody antigen-binding sites. The anti-Notch1 antibody generally is insolubilized before or after the competition and then the tracer and Notch1 bound to the anti-Notch1 antibody are separated from the unbound tracer and Notch1. This separation is accomplished by decanting (where the binding partner was preinsolubilized) or by centrifuging (where the binding partner was precipitated after the competitive reaction). The amount of test sample Notch1 is inversely proportional to the amount of bound tracer as measured by the amount of marker substance. Dose-response curves with known amounts of Notch1 are prepared and compared with the test results to quantitatively determine the amount of Notch1 present in the test sample. These assays are called ELISA systems when enzymes are used as the detectable markers.

[0723] Another species of competitive assay, called a “homogeneous” assay, does not require a phase separation. Here, a conjugate of an enzyme with the Notch1 is prepared and used such that when anti-Notch1 antibody binds to the Notch1 the presence of the anti-Notch1 antibody modifies the enzyme activity. In this case, the Notch1 or its immunologically active fragments are conjugated with a bifunctional organic bridge to an enzyme such as peroxidase. Conjugates are selected for use with anti-Notch1 antibody so that binding of the anti-Notch1 antibody inhibits or potentiates the enzyme activity of the label. This method per se is widely practiced under the name of EMIT.

[0724] Steric conjugates are used in steric hindrance methods for homogeneous assay. These conjugates are synthesized by covalently linking a low-molecular-weight hapten to a small Notch1 fragment so that antibody to hapten is substantially unable to bind the conjugate at the same time as anti-Notch1 antibody. Under this assay procedure the Notch1 present in the test sample will bind anti-Notch1 antibody, thereby allowing anti-hapten to bind the conjugate, resulting in a change in the character of the conjugate hapten, e.g., a change in fluorescence when the hapten is a fluorophore.

[0725] Sandwich assays particularly are useful for the determination of Notch1 or anti-Notch1 antibodies. In sequential sandwich assays an immobilized anti-Notch1 antibody is used to adsorb test sample Notch1, the test sample is removed as by washing, the bound Notch1 is used to adsorb a second, labeled anti-Notch1 antibody and bound material is then separated from residual tracer. The amount of bound tracer is directly proportional to test sample Notch1. In “simultaneous” sandwich assays the test sample is not separated before adding the labeled anti-Notch1. A sequential sandwich assay using an anti-Notch1 monoclonal antibody as one antibody and a polyclonal anti-Notch1 antibody as the other is useful in testing samples for Notch1.

[0726] In another embodiment, the invention provides a method for determining the effect of a therapeutic regimen for alleviating a Notch1 mediated disorder, wherein the regimen comprises the use of an Notch1 antagonist or an agonist antibody, the method comprising the steps of: a) obtaining a cell or tissue sample from an individual undergoing the therapeutic regimen b) measuring the levels of Notch1 in the cell or tissue sample; c) scoring the sample for Notch1 protein levels, and d) comparing the levels to that of a control sample to predict the responsiveness of the Notch1 mediated disorder to the therapeutic regimen. Thus, a low score, e.g., 0 or a lowering score over time suggests that the treatment regimen comprising a Notch1 antagonist, e.g., Notch1 specific antibody, is effective in reducing tumor burden or Notch1 expressing cells or level of Notch1 expression.

[0727] In certain embodiments, the methods of the invention propose contacting the sample of interest with an antibody to Notch1. In certain embodiments, the detecting is done on histological or tissue sections or cytological preparations by immunohistochemistry or immunocytochemistry. As well, detecting Notch1 may be done by immunoblotting or by Fluorescence-Activated Cell Sorting (FACS).

[0728] The invention is also directed to a method for predicting disease-free survival and/or overall survival in a patient diagnosed with an oncogenic disorder associated with Notch1 expression comprising: a) obtaining a sample of diseased or cancerous tissue from an individual presenting with an oncogenic disorder, b) detecting levels of Notch1 expressing cells in the cancer cells or cancer tissue of the sample, c) scoring the samples for expression of Notch1 levels; and d) comparing the scoring to that obtained from a control sample to determine likelihood of disease-free survival and overall survival associated with Notch1. Preferably, the scoring comprises using a scale of 0 to 4, where 0 is negative (no detectable Notch1 or level of Notch1 comparable to a control level), and 4 is high intensity staining in the majority of cells and wherein a score of 1 to 4 (i.e. a positive score) indicates a poor prognosis for disease free and overall survival in patients with said disorder.

[0729] A method for screening for metastatic potential of solid tumors is also provided. The method comprises a) obtaining a sample of tumor tissue from an individual in need of screening for metastatic potential of a solid tumor; b) reacting an antibody to Notch1 with tumor tissue from the patient; c) detecting the extent of binding of the antibody to the tissue and d) correlating the extent of binding of the antibody with its metastatic potential.

[0730] The present invention further encompasses in vivo imaging methods useful for visualizing the presence of Notch1 expressing cells indicative of an oncogenic disorder. Such techniques allow for a diagnosis without the use of an unpleasant biopsy or other invasive diagnostic technique. The concentration of detectably labeled anti-Notch1 antibody of the invention which is administered should be sufficient such that the binding to those cells having or expressing the Notch1 antigen is detectable compared to the background. Further, it is desirable that the detectably labeled anti-Notch1 antibody of the invention be rapidly cleared from the circulatory system in order to give the best target-to-background signal ratio.

[0731] Imaging analysis is well known in the medical art, and includes, without limitation, x-ray analysis, magnetic resonance imaging (MRI) or computed tomography (CE). As indicated supra, preferably, the Notch1 antibodies used in the in vivo (and also in vitro) diagnostic methods are directly or indirectly labeled with a detectable substance/label that can be imaged in a patient. Suitable detectable substances include various enzymes, prosthetic groups, fluorescent materials, luminescent materials and radioactive materials. As a rule, the dosage of detectably labeled anti-Notch1 antibody of the invention for in vivo diagnosis is somewhat patient-specific and depends on such factors as age, sex, and extent of disease. Dosages may also vary, for example, depending on number of injections given, tumor burden, and other factors known to those of skill in the art. For instance, tumors have been labeled in vivo using cyanine-conjugated Mabs. Ballou et al. (1995) Cancer Immunol. Immunother. 41:257 263.

[0732] In the case of a radiolabeled biological agent, the biological agent is administered to the patient and is localized to the tumor bearing the antigen (Notch1 receptor protein) with which the biological agent reacts, and is detected or “imaged” in vivo using known techniques such as radionuclear scanning using e.g., a gamma camera or emission tomography. See e.g., A. R. Bradwell et al., “Developments in Antibody Imaging”, Monoclonal Antibodies for Cancer Detection and Therapy, R. W. Baldwin et al., (eds.), pp. 65-85 (Academic Press 1985), which is hereby incorporated by reference. Alternatively, a positron emission transaxial tomography scanner, such as designated Pet VI located at Brookhaven National Laboratory, can be used where the radiolabel emits positrons (e.g., ¹¹C, ¹⁸F, ¹⁵O, and ¹³N).

[0733] In one embodiment the invention provides for the use of the Notch1 antibodies in the diagnosis of cancer, by specifically allowing one to detect and visualize tissues that express Notch1 or contain Notch1 expressing cells (e.g., cancer). The method comprises: (i) administering to a subject (and optionally a control subject) a diagnostically effective amount of detectably labeled anti-Notch1 antibody of the invention or an antigen-binding fragment thereof or a pharmaceutical composition thereof comprising as an active component the antibodies of the invention or binding fragments thereof that specifically bind Notch1, under conditions that allow interaction of the antibodies to Notch1 to occur; and (ii) detecting the binding agent, for example, to locate Notch1 expressing tissues or otherwise identify Notch1 expressing cells. The term “diagnostically effective” means that the amount of detectably labeled anti-Notch1 antibody of the invention is administered in sufficient quantity to enable detection of neoplasia.

[0734] In certain embodiments, the antibodies of the invention may be labeled with a contrast agent, such as barium, which can be used for x-ray analysis, or a magnetic contrast agent, such as a gadolinium chelate, which can be used for MRI or CE.

[0735] In another embodiment of the method, a biopsy is obtained from the patient to determine whether the tissue of interest expresses Notch1 rather than subjecting the patient to imaging analysis.

[0736] A radiolabeled antibody or immunoconjugate may comprise a gamma.-emitting radioisotope or a positron-emitter useful for diagnostic imaging. The label used will depend on the imaging modality chosen. The use of antibodies for in vivo diagnosis is well known in the art. Sumerdon et al., (Nucl. Med. Biol 17:247-254 (1990)) have described an optimized antibody-chelator for the radioimmunoscintographic imaging of tumors using Indium-111 as the label. Griffin et al., (J Clin Onc 9:631-640 [1991]) have described the use of this agent in detecting tumors in patients suspected of having recurrent colorectal cancer.

[0737] The methods of the present invention may also use paramagnetic isotopes for purposes of in vivo detection. The use of similar agents with paramagnetic ions as labels for magnetic resonance imaging is also known in the art -Lauffer, Magnetic Resonance in Medicine 22:339-342 (1991).

[0738] Radioactive labels such as Indium-111, Technetium-99m, or Iodine-131 can be used for planar scans or single photon emission computed tomography (SPECT). Positron emitting labels such as Fluorine-19 can also be used for positron emission tomography (PET). For MRI, paramagnetic ions such as Gadolinium (III) or Manganese (II) can be used.

[0739] For in vivo diagnostic imaging, the type of detection instrument available is a major factor in selecting a given radioisotope. The radioisotope chosen must have a type of decay which is detectable for a given type of instrument. Still another important factor in selecting a radioisotope for in vivo diagnosis is that the half-life of the radioisotope be long enough so that it is still detectable at the time of maximum uptake by the target, but short enough so that deleterious radiation with respect to the individual is minimized. Ideally, a radioisotope used for in vivo imaging lacks a particle emission, but produces a large number of photons in the 140 250 keV range, to be readily detected by conventional gamma cameras.

[0740] Radioactive metals with half-lives ranging from 1 hour to 3.5 days are available for conjugation to antibodies, such as scandium-47 (3.5 days) gallium-67 (2.8 days), gallium-68 (68 minutes), technetiium-99m (6 hours), and indium-111 (3.2 days), of which gallium-67, technetium-99m, and indium-111 are preferable for gamma camera imaging, gallium-68 is preferable for positron emission tomography. Labels such as Indium-111, Technetium-99m, or Iodine-131 can be used for planar scans or single photon emission computed tomography (SPECT).

[0741] In the case of the radiometals conjugated to the specific antibody, it is likewise desirable to introduce as high a proportion of the radiolabel as possible into the antibody molecule without destroying its immunospecificity. A further improvement may be achieved by effecting radiolabeling in the presence of the specific cancer marker of the present invention, to insure that the antigen binding site on the antibody will be protected. The antigen is separated after labeling.

[0742] Suitable radioisotopes, particularly in the energy range of 60 to 4,000 keV, include, ⁵¹Cr, ⁵⁷Co, ⁵⁸Co, ⁵⁹Fe, 131I, 121I, .124I, 86Y, 62Cu, 64Cu, 111In, 67Ga, 68Ga, 99mTc, 94mTc, 18F, 11C, 13N, 15O, 75Br, 75Se, 97Ru, 99mTc, 111In, 114mIn, 123I, 125I, 131I, 169Yb, 197Hg, and 201T1, and the like. See for example, U.S. Patent Application entitled “Labeling Targeting Agents with Gallium-68”—Inventors G. L. Griffiths and W. J. McBride, (U.S. Provisional Application No. 60/342,104), which discloses positron emitters, such as 18F, .68Ga, 94mTc. and the like, for imaging purposes and which is incorporated in its entirety by reference. Particularly useful diagnostic/detection radionuclides include, but are not limited to, 18F, 52Fe, 62Cu, 64Cu, .67Cu, 67Ga, 68Ga, .86Y, 89Zr, 94mTc, 94mTc, .99mTc, .111In, 123I, 124I, 125I, .131I, 154-158Gd, 32P, 90Y, 188Re, and 175Lu.

[0743] Decay energies of useful gamma-ray emitting radionuclides are preferably 20 2000 keV, more preferably 60 600 keV, and most preferably 100 300 keV.

[0744] Radionuclides useful for positron emission tomography include, but are not limited to: 18F, 1Mn, 2mMn, 52Fe, 55Co, 62Cu, 64Cu, 68Ga, 72As, 75Br, 76Br, 82mRb, 83Sr, 86Y, 89Zr, 94mTc, 110In, 120I, and 124I. Total decay energies of useful positron-emitting radionuclides are preferably <2,000 keV, more preferably under 1,000 keV, and most preferably <700 keV.

[0745] Also contemplated by the present invention is the use of non-radioactive agents as diagnostic reagents. A suitable non-radioactive diagnostic agent is a contrast agent suitable for magnetic resonance imaging, computed tomography or ultrasound. Magnetic imaging agents include, for example, non-radioactive metals, such as manganese, iron and gadolinium, complexed with metal-chelate combinations that include 2-benzyl-DTPA and its monomethyl and cyclohexyl analogs, when used along with the antibodies of the invention. See U.S. Ser. No. 09/921,290 filed on Oct. 10, 2001, which is incorporated in its entirety by reference.

[0746] Bispecific antibodies are also useful in targeting methods and provide a preferred way to deliver two diagnostic agents to a subject. U.S. Ser. Nos. 09/362,186 and 09/337,756 discloses a method of pretargeting using a bispecific antibody, in which the bispecific antibody is labeled with ²⁵¹I and delivered to a subject, followed by a divalent peptide labeled with ⁹⁹mTc and are incorporated herein by reference in their entirety. Pretargeting methods are also described in U.S. Pat. No. 6,962,702 (Hansen et al.), U.S. Ser. No. 10/150,654 (Goldenberg et al.), and Ser. No. 10/768,707 (McBride et al.), which are all also incorporated herein by reference in their entirety. The delivery results in excellent tumor/normal tissue ratios for ¹²⁵1 and ⁹⁹mTc, thus showing the utility of two diagnostic radioisotopes. Any combination of known diagnostic agents can be used to label the antibodies. The binding specificity of the antibody component of the MAb conjugate, the efficacy of the therapeutic agent or diagnostic agent and the effector activity of the Fc portion of the antibody can be determined by standard testing of the conjugates.

[0747] A diagnostic agent can be attached at the hinge region of a reduced antibody component via disulfide bond formation. As an alternative, such peptides can be attached to the antibody component using a heterobifunctional cross-linker, such as N-succinyl 3-(2-pyridyldithio)propionate (SPDP). Yu et al., Int. J. Cancer 56: 244 (1994). General techniques for such conjugation are well-known in the art. See, for example, Wong, CHEMISTRY OF PROTEIN CONJUGATION AND CROSS-LINKING (CRC Press 1991); Upeslacis et al., “Modification of Antibodies by Chemical Methods,” in MONOCLONAL ANTIBODIES: PRINCIPLES AND APPLICATIONS, Birch et al. (eds.), pages 187 230 (Wiley-Liss, Inc. 1995); Price, “Production and Characterization of Synthetic Peptide-Derived Antibodies,” in MONOCLONAL ANTIBODIES: PRODUCTION, ENGINEERING AND CLINICAL APPLICATION, Ritter et al. (eds.), pages 60 84 (Cambridge University Press 1995).

[0748] Methods for conjugating peptides to antibody components via an antibody carbohydrate moiety are also well-known to those of skill in the art. See, for example, Shih et al., Int. J. Cancer 41: 832 (1988); Shih et al., Int. J. Cancer 46: 1101 (1990); and Shih et al., U.S. Pat. No. 5,057,313, all of which are incorporated in their entirety by reference. The general method involves reacting an antibody component having an oxidized carbohydrate portion with a carrier polymer that has at least one free amine function and that is loaded with a plurality of peptide. This reaction results in an initial Schiff base (imine) linkage, which can be stabilized by reduction to a secondary amine to form the final conjugate.

[0749] The Fc region is absent if the antibody used as the antibody component of the immunoconjugate is an antibody fragment. However, it is possible to introduce a carbohydrate moiety into the light chain variable region of a full length antibody or antibody fragment. See, for example, Leung et al., J. Immunol. 154: 5919 (1995); Hansen et al., U.S. Pat. No. 5,443,953 (1995), Leung et al, U.S. Pat. No. 6,254,868, all of which are incorporated in their entirety by reference. The engineered carbohydrate moiety is used to attach the therapeutic or diagnostic agent.

[0750] In situ detection can be accomplished by removing a histological specimen from a patient, and providing the combination of labeled antibodies of the present invention to such a specimen. The antibody (or fragment) is preferably provided by applying or by overlaying the labeled antibody (or fragment) to a biological sample. Through the use of such a procedure, it is possible to determine not only the presence of Notch1 but also the distribution of Notch1 in the examined tissue. Using the present invention, those of ordinary skill will readily perceive that any of a wide variety of histological methods (such as staining procedures) can be modified in order to achieve such in situ detection.

[0751] Also provided by the invention is in vivo biophotonic imaging (Xenogen, Almeda, Calif.) which utilizes real-time luciferase. The luciferase gene is incorporated into cells, microorganisms, and animals (e.g., as a fusion protein with a marker of the present invention). When active, it leads to a reaction that emits light. A CCD camera and software is used to capture the image and analyze it.

[0752] In another embodiment, the anti-Notch1 antibody is unlabeled and imaged by administering a second antibody or other molecule that is detectable and that can bind the anti-Notch1 antibody. A specifically bound and labeled antibody can be detected in the patient using known methods, including, but not limited to, radionuclide imaging, positron emission tomography, computerized axial tomography, X-ray or magnetic resonance imaging method, fluorescence detection, and chemiluminescent detection.

[0753] In vivo imaging methods can also be used for developing a prognostic evaluation of the condition of a patient suspected of exhibiting an oncogenic disorder mediated by Notch1.

### Purification

[0754] Still further, the anti-Notch1 antibodies described herein may also be used as affinity purification agents. In this process, the antibodies are immobilized on a solid phase such a Sephadex resin or filter paper, using methods well known in the art. The immobilized antibody is contacted with a sample containing the Notch1 protein (or fragment thereof) to be purified, and thereafter the support is washed with a suitable solvent that will remove substantially all the material in the sample except the Notch1 protein, which is bound to the immobilized antibody. Finally, the support is washed with another suitable solvent, such as glycine buffer, pH 5.0, that will release the Notch1 protein from the antibody.

### Articles of Manufacture

[0755] In another aspect of the invention, an article of manufacture containing materials useful for the treatment, prevention and/or diagnosis of the disorders described above is provided. The article of manufacture comprises a container and a label or package insert on or associated with the container. Suitable containers include, for example, bottles, vials, syringes, etc. The containers may be formed from a variety of materials such as glass or plastic. The container holds a composition which is by itself or when combined with another composition(s) effective for treating, preventing and/or diagnosing the condition and may have a sterile access port (for example the container may be an intravenous solution bag or a vial having a stopper pierceable by a hypodermic injection needle). At least one active agent in the composition is an antibody of the invention. The label or package insert indicates that the composition is used for treating the condition of choice, such as cancer. Moreover, the article of manufacture may comprise (a) a first container with a composition contained therein, wherein the composition comprises an antibody of the invention; and (b) a second container with a composition contained therein, wherein the composition comprises a further therapeutic agent, including, e.g. a chemotherapeutic agent or an anti-angiogenesis agent, including, e.g., an anti-VEGF antibody (e.g. bevacizumab). The article of manufacture in this embodiment of the invention may further comprise a package insert indicating that the first and second antibody compositions can be used to treat a particular condition, e.g. cancer. Alternatively, or additionally, the article of manufacture may further comprise a second (or third) container comprising a pharmaceutically-acceptable buffer, such as bacteriostatic water for injection (BWFI), phosphate-buffered saline, Ringer's solution and dextrose solution. It may further include other materials desirable from a commercial and user standpoint, including other buffers, diluents, filters, needles, and syringes.

[0756] Additionally, the article of manufacture may further comprise a second container comprising a pharmaceutically-acceptable buffer, such as bacteriostatic water for injection (BWFI), phosphate-buffered saline, Ringer's solution and dextrose solution. It may further include other materials desirable from a commercial and user standpoint, including other buffers, diluents, filters, needles, and syringes.

[0757] Kits are also provided that are useful for various purposes, e.g., for Notch receptor cell killing assays, for purification or immunoprecipitation of Notch receptor from cells. For isolation and purification of Notch receptor, the kit can contain an anti-Notch receptor antibody coupled to beads (e.g., sepharose beads). Kits can be provided which contain the antibodies for detection and quantitation of Notch receptor in vitro, e.g. in an ELISA or a Western blot. As with the article of manufacture, the kit comprises a container and a label or package insert on or associated with the container. The container holds a composition comprising at least one anti-Notch receptor antibody of the invention. Additional containers may be included that contain, e.g., diluents and buffers, control antibodies. The label or package insert may provide a description of the composition as well as instructions for the intended in vitro or diagnostic use.

[0758] The foregoing are merely exemplary detection assays for Notch1. Other methods now or hereafter developed that use anti-Notch1 antibody for the determination of Notch1 are included within the scope hereof, including the bioassays described herein.

[0759] The following are examples of the methods and compositions of the invention. It is understood that various other embodiments may be practiced, given the general description provided above.

### EXAMPLES

### Example 1

### Generation of 293 Cell Line Stably Expressing Human Notch1, 2, 3 and 4

[0760] Gene synthesis and Vector Construction for human full-length Notch1, 2, 3 and 4 with FLAG tag at its C-terminus. Stable cell lines were generated for all four Notch genes (Notch1, Notch2, Notch3 and Notch4) with FLAG tag using the same strategy, vector and cell substrate. Only Notch1 is described as a representative in this example. The full-length coding region, along with their respective 5′- and 3′-flanking sequences for Notch1, was chemically synthesized at DNA2.0. The open reading frame was tagged with FLAG peptide (DYKDDDDK) at the C-terminal end before the stop codon (Appendix I and II). The flanking sequences contain cloning site HindIll and GCCGCCACC in front of the ATG start codon at its 5′-end and stop codon followed by cloning site NotI at its 3′-end. Plasmids containing the HindIII-NotI DNA fragments were received from DNA2.0 and the HindIII-NotI fragments were isolated. The vector pcDNA5/FRT/T0 (Invitrogen) was used to express the FLAG tagged full-length Notch1, open reading frame. The pcDNA5/FRT/T0 contains two features, together with matching cell lines, needed for the generation of Notch stable cell lines. For one, the vector pcDNA5/FRT/T0 allows the expression of Notch1 with FLAG tag. The vector contains human cytomegalovirus early promoter with two tetracycline operators to allow tight control of Notch1 expression in cell lines where the tetracycline repressor is expressed. For the other, the vector pcDNA5/FRT/T0 contains the FRT sequence in front of promoter-less and ATG-less hygromycin gene, which allows the homologous recombination between the vector FRT sequence and the identical chromosome FRT sequence in the presence of the FLIP recombinase provided by co-transfection of pOG44 vector (Invitrogen). The matching cell line 293 TREX FLIP contains both tetracycline repressor allowing tight control of Notch1 expression and FRT sequence permitting homologous recombination. The homologous recombination between the vector FRT sequence and host cell FRT sequence will allow the FLIP-IN of the entire plasmid sequence and hence the Notch1 expression cassette. At the same time, the FRT sequence in the host cell chromosome was designed such that it can put the promoter-less and ATG-less hygromycin gene in frame with the start codon ATG to confer the transfected cells with expected homologous recombination hygromycin resistant. The vector pcDNA5/FRT/T0 was digested with HindIII+NotI and the Notch fragment digested with the same set of enzymes was ligated with the linearized vector to form pcDNA5/FRT/T0-HN1+FLAG. Ligation product was transformed into XL2 Blue MRF′ cells and transformants were screened and positive clones sequencing confirmed.

[0761] Generation of 293 cell line stably expressing human full-length Notch1. Inducible expression stable cell lines were generated using Invitrogen FLPIn system by transfecting pcDNA5/FRT/T0-HN1+FLAG into 293 FLPIn TREX. The description and the rationale of the cell line are provided in the earlier section. To generate stable cell lines, pOG44, which provides constitutively expressed FLP recombinase (flp-F70L), and the pcDNA5/FRT based vector, pcDNA5/FRT/T0-HN1+FLAG were co-transfected into the 293 FLPIn/TREX host cell line. FLP recombinase mediates FRT site specific insertion of the construct by homologous recombination between FRT sites in the expression vector and those integrated into the 293 FLPIn TREX cell genome. After FRT insertion hygromycin resistance is used as a selection marker. pOG44 was co-transfected with pcDNA5/FRT/T0-HN1+FLAG in a 9:1 ratio (w/w) pOG44:expression plasmid using Fugene6 (Roche) lipid-based transfection reagent in a 4:1 (v/w) ratio. Cells are re-fed 48 hours post transfection with media containing hygromycin (100 ug/ml) selection agent. Colonies are expanded to generate stable expression cell lines.

[0762] Stable Cell Line Characterization. Stable cell line expression screening was completed with Western blot analysis (FIG. 1). Cells were lysed with 2× lysis buffer+Protease inhibitor Cocktail and loaded to 4-12% Bis-Tris gel and run under denaturing and reducing conditions. Proteins were transferred to PVDF membrane and blocked overnight in 12% milk. Detection was completed using a 1:2000 dilution of Anti-Flag M2 peroxidase conjugated antibody (Sigma) incubated at RT for 120 minutes. Kinetic expression of stably expressed human full-length Notch1 as functions of time and tetracycline concentration, respectively, was conducted where optimal dose/time effect for the Notch lines was identified.

[0763] Immunohistochemical (IHC) staining of stable cell lines. The human full-length Notch1 expressing stable cell lines were analyzed by IHC. Confluent T225 flasks were trypsinized (HyClone, SH30236-01) and the resulting cell suspension was pelleted by centrifugation at 250× g for 10 minutes. The media was aspirated and 3-4 drops of warmed Histogel (Richard-Allan Scientific HG-4000-012) was added to each loosened cell pellet. The Histogel pellet was mixed and cooled at 2-8° C. for 60 minutes and placed in 10% formalin for 16-24 hours. The Histogel pellet was infiltrated with 70% ethanol, 95% ethanol, 100% ethanol, xylenes, and paraffin overnight (Sakura VIP5A-F1). The Histogel pellet was then embedded in paraffin (Sakura TEC5EMA-15101), cut at 5 μm, and mounted onto Superfrost plus slides. Sections were deparaffinized, rehydrated, and placed in Target Retrieval Buffer 1× (Dako S1699) in a Decloaking Chamber (Biocare Medical DC2002) for heat-induced epitope retrieval at 125° C. for 30 seconds. Endogenous peroxidase activity was blocked using Peroxidase Blocking Reagent (Dako K4007) for ten minutes. Sections were washed with Phosphate Buffered Saline (PBS), and incubated with anti-Notch 1 (0.02 μg/ml, Santa Cruz, SC-6014R), anti-Notch 2, (1.6 μg/ml, Santa Cruz, SC-5545), anti-Notch 3 (0.2 μg/ml, Abcam, ab23426), anti-Notch 4 (0.5 μg/ml, Santa Cruz, SC-5594) and anti-FLAG M2 mouse monoclonal antibody Peroxidase Conjugate (1:100, Sigma, A8592) for 30 minutes at room temperature. Sections were washed with PBS and incubated with Envision+polymer (no polymer used for anti-FLAG M2) for 30 minutes at room temperature, washed with PBS, and diaminobenzidine was used for development of a brown reaction product (Dako K4007). The slides were immersed in hematoxylin for 30 seconds to counterstain (Sigma MHS32). The staining was visualized and shown in FIG. 2.

### Example 2

### Solid Phase Panning Procedures

[0764] Phage antibody display libraries in single chain (ScFv) format were derived from a phage library. Three libraries including BMV (bone marrow), CS (spleen) and DP47 (frame work based CS) were used for panning Notch 1 binding antibodies. Human IgG Fc protein was purchased from Chemicon International (cat#AG714) and was used for de-selection in panning Notch1 extracellular fragment (amino acid 19-526) with Fc fusion protein was purchased from R&D Systems (catalog number: 3647-TK). Helper phages (M13K07^{trp}) used for rescuing phagemid and phage amplification were provided by CAT.

[0765] Elution buffer preparation was done as following: add acetic acid to high quality deionized water to a final concentration of 50 mM and filter through 0.22 um filter to sterilize solution. Trypsin (Sigma cat#T-1426, from bovine pancreas) was dissolved in 50 mM acetic acid to give a 500× stock solution (5 mg/ml) and small volume aliquots were stored at −20° C. Working solution (1×) was made freshly each time by diluting 500× stock solution into 0.1 M sodium phosphate buffer at pH 7.0.

[0766] Panning procedures are outlined in FIG. 3. The first step is coating Notch1 antigen on Maxisorp 96-well plate at 25 ug/ml concentration in Dulbecco's PBS (GIBCO) over night at 4° C. Panning round 1 used 4 wells and 75 ug of Notch1 was used in each well. After coating, the wells with coated Notch antigen were rinsed 3 times with 1× PBS to remove the unbound antigen, then blocked with 5% (w/v) skimmed milk in PBS-D for 2 hours at room temperature. The library was supplied in 50 ul aliquots, each 50 ul contains 10̂12 phage particles. For the first round panning, 50 ul of the phage library was mixed with 950 ul of 5% milk blocker in PBS with 0.1% Tween in a 1.6 ml tube, and human Fc protein (200 ug/ml) was also added and incubated at RT for 1 hour to block phage and neutralize Fc binding. After pre-blocking step, the blocked phage library was incubated with Notch1 antigen in the coated well with slow mixing at RT for 2 hours. Following washing with PBS-Tween and PBS, 250 ul per well of Trypsin solution was added and incubated at 37° C. incubator with cover for 30 min to elute bound phages.

[0767] To recover eluted phages, E. coli (TG1) cells were grown from a single colony in a flask with 50 ml of 2-TY medium at 37° C. with shaking 300 rpm until cell density reaching OD600nm at 0.5-0.8. The prepared TG1 cells were added to the eluted phage solution and incubated at 37° C. for 1 hour with slowing shaking at 100 rpm. After the infection step, Tg1 cells were plated on selection agar plate and incubated at 30° C. over night. Single colonies and pool of colonies were used for phage preparation to be used in next round panning or ELISA screening.

[0768] Phage can be rescued and amplified with E. coli using helper phage. MK13K07 helper phage engineered with trypsin cleavage site was added to E. coli cells at growth phase (OD600 at 0.5-0.8) at ratio of 10 helper phage per cell and incubated at 37° C. for 30 minutes without mixing, then at 150 RPM for an additional 30 minutes for helper phage infection. Then, media with helper phage solution were removed by spinning down cells at 3000 g×10 minutes. After removing all supernatants, cells were re-suspended in 2TYAK media (2TY medium with 100 ug/ml Ampicillin and 25 ug/ml kanamycin) and grow overnight with 280 rpm shaking at 25° C. Cells were centrifuged down and supernatants with phage were used for following rounds of panning and ELISA screening.

### Example 3

### Whole Cell Panning

[0769] Full length Notch1 was transfected and expressed in 293 Flp-in Trex cells and Notch1 expression was induced by 1 ug/ml doxycycline for 24 hours. The detailed procedures for Notch1 cell line generation are described in other section. Panning was conducted using Notch1 expression cells for Notch1 binding phage selection and 293 Flp-in Trex cells used for non-specific phage de-selection control. Induction media for Notch1 expression contained advanced DMEM, 5% FBS (Tet defined), 2% L Glut, 1% Pen Strep, hygromycin (100 ug/ml), 1 ug/ml doxycycline.

[0770] Two days before panning, cells were seeded by splitting cells into fresh media. After 1 day of culture, cells were induced with doxycycline at 1 ug/ml concentration for 24 hours. Phage blocking was done using similar procedures as described in solid phase panning Both Notch1 expression cells and 293 TRex control cells were suspended from culture surface by add 5 ml of enzyme free cell dissociation buffer and leaving the flask at RT for 3-5 minutes to detach cells. Cell suspension was centrifuged down at 1800 rpm for 5 min, then removed media and re-suspended cells in 1 ml of fresh media with 5% fetal bovine serum (FBS) and 1×10̂7 cells.

[0771] To de-select phages binding to 293 TRex control cells, blocked phage was mixed with 293 TRex control cells (1×10̂7) with gentle mixing at 4° C. for 60 min. After the selection, phage supernatants were used to incubate with Notch1 expressing 293 cells for 2 hour at 4° C. with slow mixing. After the phage capture and incubation, cells were washed with 1 ml of PBS/0.1 Tween for 2 times and with 1 ml PBS for one time. Elution of cell Notch1 bound phages was done by adding 1 ml of 1× trypsin solution and incubating cells at 37° C. incubator for 30 min.

[0772] Procedures for phage rescue and amplification in TG1 E. coli cells are similar to that described in the example 2 for solid phase panning

### Example 4

[0773] ELISA with Phage Display ScFv and Recombinant Notch1 ECD Protein

[0774] Single E. coli colonies were grown on TYAG agar plates at 37° C., over night after infection of TG1 with panning eluted phages. Fresh TYAG media (270 μl/well) were inoculated with cells picked from single colony and cells were cultured at 37° C., 280 rpm for 4-5 hr, to OD600=0.5-1.0. Sixty micro-liter per well (60 ul/well) of M13K07 helper phage with titer of 10¹⁰ pfu/ml was added to TG1 cells and helper phage infection was conducted at 37° C. for lhr with 100 rpm shaking After helper phage infection, cells were centrifuged down at 3200 rpm for 10 min and supernatants were removed and cells were resuspended back into 150 ul of 2XTY media with 50 μg/ml ampicillin and 25 μg/ml kanamycin. The cells were cultured at 30° C., 280 rpm, over night.

[0775] After over night phage amplification, cells were centrifuged down at 3200 rpm for 15 min, and supernatants with phage were blocked with 5% milk blocker by mixing 40 ul blocker with 40 ul of phage supernatants for 1 hour at room temperature.

[0776] Recombinant human Notch1 extracellular domain protein (amino acid 19-526) from R&D Systems was used to coat maxisorp binding plates (Costa) at 4 μg/ml concentration in PBS over night at 4° C. Notch1 antigen needed per plate is 10 ml, 100 μl/well. Notch1 antigen coated plates were blocked with 200 ul of milk blocker solution (2% skim milk in PBS) each well at RT for 2 hour. The plates were washed with PBS/0.05% Tween 20 for 5 times and PBS for 3 times. Then the blocked phage solution was added to the Notch1 coating plate and incubated at room temperature for 2 hour. After incubation and washing steps, detection antibody for M13-phage with horse radish peroxidase (HRP) enzyme conjugation (NC9491398, Fisher/Amersham Bioscience) was added to plate at 100 μl/well in 1:2000 dilution with milk blocker. After 1 hour incubation at room temperature and washing step, 100 ul of HRP substrate, tetramethylbenzidine (TMB, Sigma) was added to each well and incubate for 5 min, then 50 μl of 0.5M H₂SO₄ was added to stop reaction and plates were read at 450nm for absorbance.

[0777] Vector phagemid without antibody display was used as assay control and positive binding clones were selected if signal/background is equal to or bigger than 5.

### Example 5

[0778] ELISA with Phage Display ScFv and Notch1 Expressing Cells

[0779] Notch1 expressing 293 Flp-TRex cells were cultured in advanced DMEM with 5% FBS (Tet defined), 2% L-Glut, 1% Pen/Strep, Hygromycin (100 ug/ml) and 293 Flp-TRex control cells were cultured in a similar media but with Zeocin (antibiotic 50 μg/ml) selection. Two days before ELISA, cells were detached from culture flask with Trypsin (0.25%) and cell number was counted using trypan blue staining method. In each well, 100 ul of cells (˜5×10E4 cells) were seeded in a 96-well cell culture plate (Costar, cat #3595) and incubated at 37° C., 5% CO₂ overnight. After the overnight culture, cells were induced with doxycyclin (2 μg/ml) for 24 hours and cells then were used for phage binding in ELISA.

[0780] Notch1 expression cells were fixed by adding 10% of buffered Formalin phosphate (Fisher, cat#SF100-4) and incubating at room temperature for 20 minutes. After fixing cells, 200 ul of wash buffer (from Superarray cat#FA001) per well was used to wash cells twice, 5 min incubation time for each wash. Quenching buffer (1% H2O2 and 0.1% NaN3 in 1× wash buffer) was added to cells and incubated at RT for 20 minutes and then cells were washed with PBS and blocked with 3% no fat dry milk in PBS at RT for 1 hour. Procedures for phage preparation are similar to that described in example 3 and phages were blocked with 3% milk blocker before adding to cells. Per well 100 μl of blocked phage was added and cells were incubated with phage at RT for 2 hours. After phage/cell incubation, plates were washed 3 times with washing buffer, 5 minutes incubation each time and final wash with PBS. Anti-M13 phage antibody with HRP was used for detection of cell bound phage. Details are also described in example 4.

### Example 6

### Sequencing Positive Clones and Analyzing Sequences Using IMGT Program

[0781] Notch1 binding clones were plated onto TYAG plates and incubated at 37° C. over night. Single colonies were picked out to grow in liquid medium over night and plasmid DNA were isolated using QIAGEN kit. Sequencing of ScFv using plasmid pCANTAB6 vector was conducted using following two primers and all sequences were confirmed with double strand sequencing.

Forward primer sequences are
5′-CAGGAAACAGCTATGAC-3′
Reverse primer sequences are
5′-GTCGTCTTTCCAGACGTTAGT-3′

[0782] A total of 147 unique sequences were identified from solid phase and whole cell panning (51 were Notch 1 binding specific and 96 clones can bind both Notch1 and Notch3 receptors)). The list of the amino acid, DNA, and CDR antibody sequences for both the heavy and light chain is included in Appendix III and IV. As indicated in the mentioned appendix, the selected clones were grouped in different buckets depending on their capability to bind by FACS either Notch1 (Appendix III) or Notch1/Notch3 (Appendix IV).

### Example 7

### FACS Screening of Cell Notch1 Binding Antibodies Using Phage Display ScFv

[0783] 293 Flp-TRex Notch 1 cells were harvested and resuspended in PBS with 3% FBS at cell density approximately 1×10⁶/ml. Phage display ScFv was prepared by over night growth of TG1 cells with M13 helper phage infection and detailed procedures of phage amplification step are described in example 2. Over night grown phage display ScFv was pre-block in PBS, 3% FBS at RT for 1 hr and 100 μl of cells was incubated with the pre-blocked phages at RT for 45 min. Cells were transferred into FACS tubes and washed with 4 mL PBS, 3% FBS, then centrifuged at 1200 rpm for 10 minutes. Supernatant was removed and cells were stained with biotinylated anti-M13 phage antibody (Progen cat.no. 61597) for 45 min at RT. After washing cells with 4 mL of PBS, 3% FBS and collecting cells after centrifugation at 1200 rpm for 10 minutes, cells were stained with streptavidin-APC (Invitrogen 5868) for 30 min at RT. Cells were washed again with 4 mL PBS, 3%FBS, then centrifuged down at 1200 rpm for 10 minutes. Cell pellets were fixed in 1% formaldehyde and analyzed on a FACSCalibur (BD Biosciences) by collecting 30,000 events from gate 1.

[0784] M13 phage without ScFv display on surface was used as negative control. FIG. 4 shows FACS graph for one of Notch1 binding antibody displayed as ScFv on phage.

### Example 8

[0785] Conversion of scFv Leads into IgGs for Further Characterization

[0786] scFv leads selected for IgG conversion. Following the library panning and screening described in earlier examples, a battery of scFv clones were selected for IgG conversion. The scFv variable region DNA and amino acid sequences for both the heavy and light chain of the antibodies are outlined in Appendix III and IV. All heavy chain variable regions were in-frame fused with human IgG1 constant region (Appendix V and VI), all light chain variable regions were in-frame fused with matching light chain constant regions, either lambda or kappa one (Appendix V and VI). The leader sequences were also in-frame fused with the variable regions accordingly. Their DNA and protein sequences are shown in Appendix VII and VIII, respectively.

[0787] IgG conversion vectors. The converted IgGs can be expressed using plasmid based vectors. The expression vectors were built such that they contain all the necessary components except the variable regions. In the basic vectors, the expression of both light and heavy chains was driven by human CMV promoter and bovine growth hormone polyadenylation signal. The leader sequence in the front mediated the secretion of antibodies into the culture medium. The heavy chain leader sequence was MEWSWVFLFFLSVTTGVHS whereas the light chain leader sequence was MSVPTQVLGLLLLWLTDARC (Appendix VII and VIII). The constant regions for the matching light or heavy chain (Appendix V and VI) were built in the vectors. In the case of light chain expression vectors, the constant region can be either lambda or kappa; In the case of heavy chain expression ones, the constant region can be different subclass isotype, e.g., IgG1 or IgG2. Between the leader sequence and the constant region, the intergenic sequences contains cloning sequences for seamless in-frame fusion of the incoming variable region with the leader sequence at its 5′-end and the constant region at its 3′-end using In-Fusion cloning strategy (Clontech). The expression vectors carry oriP from EBV viral genome for prolonged expression in 293EBNA cells and the bacterial sequences for kanamycin selection marker and replication origin in E. coli. When the variable regions were inserted, the IgGs can be directly expressed in mammalian cells. All the heavy chain variable regions were cloned into IgG1 expression vector (pV1JNSA-BF-HCG1) and the light chain variable regions were cloned into matching kappa or lambda expression vector (pV1JNSA-GS-FB-LCK or LCL).

[0788] IgG Conversion Cloning. The cloning procedure for the resulting antibody expression vectors is described below. The variable regions were PCR amplified. PCR reactions was carried out in a volume of 25 μl containing high fidelity PCR master mix, template volume 1 μl and forward and reverse primers: 1 μl each. PCR condition was 1 cycle of 94° C., 2 minutes; 25 cycles of 94° C., 1.5 minutes; 60° C., 1.5 minutes; 72° C., 1.5 minutes and 72° C., 7 minutes; 4° C. until removed. The PCR products were then digested with DpnI and purified with QIAquick plate kit (Qiagen). 100 ng of the corresponding previously linearized heavy chain or light chain vectors annealed to 10 ng of the PCR fragment with an In-Fusion reaction (Clontech IN-Fusion Dry-Down Cloning Kit). The reaction mixture is then transformed to XL2 Blue MRF' competent cells and plated overnight on Agar plates containing 50 ug/ml Kanamycin. Light chain constructs are then digested with HindIII+NotI and heavy chain constructs are digested with AspI+HindIII to check structure by restriction analysis. The DNA sequences for all the clones were confirmed by sequencing.

[0789] IgG Expression in Mammalian Cells, Purification and Characterization. Sequencing confirmed constructs of light chain and heavy chain DNA were transfected in 293 Freestyle cells or in EBNA monolayer cells. The 293 Freestyle cells were transfected using 293Transfectin from Invitrogen. EBNA monolayer cells were transfected using PEI based transfection reagents. Transfected cells were incubated at 37° C./5% CO2 for 7 days in Opti-MEM serum free medium (Invitrogen). The medium was collected, spin down and filtered through 0.22 um filtration system (Millipore), then concentrated by Centricon (Millipore). Concentrated medium were mixed 1:1 with binding buffer (Pierce), and then was loaded into pre-equilibrated protein A/G column (Pierce) or HI trap rProtein A FF from GE healthcare. Loaded column was washed with binding buffer and eluted with elution buffer (Pierce). Eluted antibody was neutralized immediately and dialyzed against buffer PBS for overnight. Dialyzed antibody was concentration with Amicon (Pierce) and protein concentration was determined by OD₂₈₀ₙₘ with the extinct coefficient of 1.34 mg/ml. Purification antibody was analyzed using SDS-PAGE (Invitrogen), or protein labchip (Caliper LifeSciences). SDS-PAGE was run under non-reduced conditions (FIG. 5).

### Example 9

### Notch1 Antibody Titration ELISA for Binding Affinity (EC50) and Epitope Determination

[0790] To prepare human Notch1 ECD domain proteins for titration ELISA, Notch1 ligand binding ECD (EGF like domain 1-13) was diluted in PBS and human Notch1 NRR antigen in TBS with 10 mM CaCl2 and working concentration for coating maxisorp plates was 5 ug/ml. Coating 96-well plates was done by adding 100 ul of Notch1 antigen solution to each well and incubating over night at 4° C. Plates were blocked with 300 ul of milk blocker per well and incubated for 2 hour at RT. Purified Notch1 binding antibodies IgG1 was diluted in series of 3-fold cross 12 wells in columns in milk blocker with starting concentrations from 50 ug/ml to 500 ug/ml (100 uL/well) depending on binding affinity. Anti-Notch1 antibody was incubated with coated Notch1 antigen for 2 hours at RT. After washing plates with PBS or TBS buffer, anti-human lambda light chain antibody with HRP was used for detection antibody and absorbance at 450 nM was read with a plate reader.

[0791] FIG. 6A and 6B show the binding curves of Notch 1 Mabs in different concentrations to ligand binding ECD domain protein (FIG. 6A) and LNR-HD domain protein (FIG. 6B), respectively.

[0792] To determine EC50 value, the data from titration ELISA was curve fitted using PRISM software and Table 1 shows EC values for selected Notch1 binding antibodies. Binding epitope was determined based on binding profiles assayed with two different Notch1 ECD domains in titration ELISA.

### Example 10

### Binding Kinetic Constants Determined Using BIAcore Analysis

[0793] All experiments were performed at 25° C. at a flow rate of 40 μl/min. To prepare a BIAcore assay, Notch1-ECD Fc fusion protein (Notch1/Fc) from R&D Systems (10 μg/ml each in acetate buffer, pH 4.0) was immobilized onto a carboxymethyl dextran sensorchip (CM5) using amine coupling procedures as described by the manufacturer. Close to 500 resonance units (RU) of Notch1/Fc were linked onto Flowcells (FC1, 2). FC1 was used as the reference cell. Specific signals were the results of differences of signals obtained on FC2 versus FC1. The analyte (Notch1 Mabs), was injected during 90 seconds at five different concentrations (50, 25, 12.5, 6.25 and 3.125 nM) in 0.5% P20, HBS-EP buffer. The dissociation phase of the analyte was monitored over a period of time ranging 10-30 minutes. Running buffer was also injected under the same conditions as a reference. After each cycle (antibody+analyte injection), both Flowcells were regenerated by injecting 20 to 45 μl of Glycine-HCl buffer, pH 1.5, to eliminate all Mabs and Notch1/Mab complexes captured on the sensorchip.

[0794] Binding kinetics constants of the anti-Notch1 Mab to Notch1/Fc were characterized by both association and dissociation rate constants kₐ and k_{d}, respectively. Equilibrium dissociation constant (KD) was calculated by the ratio between dissociation (koff) and association (kon) rate constants. Table 2 shows kinetic constants of Notch1 binding antibodies.

### Example 11

### Ligand Blocking Assay

[0795] This assay was developed based on a dissociation-enhanced time resolved fluorometric assay (DELFIA) technology. Briefly, Notch ligand was coated in Maxisorp 96-well plates with 100 ul/well at 2 ug/ml concentration in D-PBS and incubated at 4° C. over night. The coated plates were blocked by adding 300 ul/well of 5% BSA in D-PBS blocker and incubating for 2 hours at room temperature. Notch1/Fc ECD protein was pre-labeled with europium (Eu) reagent according to manufacture suggested procedure (PerkinElmer). Notch1 monoclonal antibody in concentration titrations (0-30 mg/ml) was incubated with fixed amount (0.5 ug/ml) of Eu labeled Notch1/Fc for 2 hour with shaking before adding to DLL coated plate to block ligand binding site with antibody. After the incubation and blocking step, mixture of Notch1 antibody and Eu-Notch1/Fc was added to the Notch1 ligand coated plates and incubated at RT with slow shaking for lhour to capture Notch1/Fc protein through ligand receptor interaction. Then plates were washed with PBS-0.05%Tween for 5 times and with PBS for 3 times with a plate washer and 100 ul/well of enhancement solution was added for 5 minutes with shaking after washing step to release europium from complex of Eu-Notch1/Fc receptor and ligand. Fluorescence signals were read using Victor3-V plate reader (PerkinElmer) Inhibition of Notch1/Fc binding to ligand by Notch1 antibody was shown in FIG. 7 with increasing antibody concentrations corresponding to decreasing Eu-Notch1/Fc signal.

### Example 12

### Characterization of Notch Monoclonal Antibodies (Mabs) by FACS

[0796] To determine whether the Notch Mabs bind selectively to Notch1 on the surface of viable cells, FACS analysis was performed using dox-inducible 293 FlpIn (TREx) cells stably expressing the full-length Notch1, -2, -3, or -4 receptors, respectively. Notch 293 FlpIn (TREx) cells were treated with dox (2 ug/ml) for two days to induce Notch expression before collecting them for FACS surface expression analysis. The cells were harvested from tissue culture flasks using Trypsin for 15 min, centrifuged at 1200 rpm for 10 minutes and resuspended in 2 ml PBS with 2% fetal bovine serum (2% FBS/PBS). The cells were counted, adjusted to 10⁷ cells/ml and 0.1 ml of cells was incubated with 1 ug of each Mab for 40 minutes at 4° C. The cells were washed, resuspended in 0.1 ml 2% FBS/PBS and incubated with 1 ug R-PE-conjugated goat anti-human Ig (Jackson ImmunoResearch) for 30 minutes at 4° C. Cells were washed, resuspended in 0.3 ml PBS with 10% formaldehyde and analyzed on a FACSCalibur (Becton Dickinson, Mt View, Calif.).

[0797] A panel of 26 Mabs was tested for the ability to bind 293 FlpIn (TREx) cells over-expressing Notch receptors. During the pre-screening of the scFvs generated by panning of the CAT libraries, these Mabs showed specificity and selectivity for Notch1 receptor. Antibodies binding to the Notch1 HD-LNR region (e.g., WC-75) showed a greater increase in fluorescence (MFI=1483), when compared to isotype control (MFI=9), than antibodies binding to the Notch1 ligand binding domain (LBD) (e.g., WC-613, MFI=211) (FIG. 8A). The most potent Notch1 Mabs (IC50s<25 nM) bind to the parental (e.g., WC-75, MFI=98) and to the Notch-2, -3, and -4 over-expressing 293 FlpIn (TREx) cells (FIG. 8A). These results suggest the presence of endogenous levels of Notch1 on the surface of the293 FlpIn (TREx) parental cells, which could not be detected previously using commercial anti-Notch1 antibodies. Also, the most potent Mabs showed binding to LS-1034 (e.g., WC-75, MFI=92) and BxPC3 (e.g., WC-75, MFI=23) cells (FIG. 8B) compared to the binding of IgG isotype control antibody (MFI=9). Analysis of protein expression by Western blot has previously shown the presence of Notch1 in LS-1034 and BxPC3 cancer cell lines (not shown).

### Example 13

### Functional Assays—Characterization of IgGs

[0798] Generation of mouse and human Notch antigens and stable cell lines. Chimeras of human Notch receptors were prepared by inserting the Gal-4 protein into the Notch intracellular domain (NICD) previously deleted of two (e.g., chimera Notch1-Gal4) or all (e.g., chimera Notch2-Gal4) ankryrin repeats and most of its RAM domain.

### Materials:

[0799] Human osteosarcoma cells: U2OS-FlpIn-TREx/human N1Gal4
   [0800] U2OS-FlpIn-TREx/human N2Gal4
   [0801] U2OS-FlpIn-TREx Trex/hN3Gal4 (BWH, Boston)*
[0802] Human osteosarcoma cells: U2OS-FlpIn-TREx/mouse N1
[0803] Mouse Fibroblast cells: 3T3-/Jag2 (BWH, Boston)*
[0804] DNA reporter gene: pFR-Luc (Stratagene, Cedar Crest, Tex.)
[0805] Transfection reagent Fugene 6 (Roche, Indianapolis, Ind.)
[0806] Bright-Glo Luciferase reagent (Promega, Madison, Wis.) * Brigham and Women's Hospital, Boston

### Methods:

[0807] a. Generation of Human Notch-Gal4 Chimeric U2OS Cell Lines

[0808] The full-length Notch1 and -2 (both with a c-terminal FLAG tag) receptors were synthesized by DNA 2.0 Technologies. In the Notch1 chimera, the Gal4 binding domain (Gal4-GVP plasmid, Invitrogen, Carlsbad, Calif.) was PCR amplified and inserted into the Notch1-FLAG gene at the Bsu36I site (in the RAM sequence of NICD) and Stul site (in the second Ankyrin repeat of NICD)). This insertion replaces most of the RAM sequence and the two Ankyrin repeats with the Gal4 binding domain sequence. In the Notch-2 chimera, the Gal4 binding domain was PCR amplified and inserted into the Notch2-FLAG gene at the MscI site (in the RAM sequence of NICD) and MscI site (in the Ankyrin repeat region of NICD). This insertion replaces most of the RAM sequence and all of the Ankyrin repeats with the Gal4 binding domain sequence. Both chimeric genes, Notch1 and -2 Gal4, were subcloned into pcDNA5 FRT TO vector (Invitrogen) and used to create stable U2OS cell lines over-expressing the Notch1 and -2-Gal4 chimeric receptors. U2OS FlpIn (TREx) parental cells (obtained from the Brigham and Women's Hospital, Boston) were stably transfected using the Fugene transfectant reagent and maintained in accordance with Invitrogen's 293 FlpIn (Trex) cell line protocol. Cells were selected for and maintained in DMEM high glucose (Invitrogen) with 10% FBS (Hyclone, Logan, Utah), 1X Pen-Strep (Mediatech, Herndon, Va.), and 100 ug/ml Hygromycin (Mediatech).

b. Generation of Full-Length Mouse Notch1 U2OS Cell Lines

[0809] The full-length mouse Notch1 receptor was synthesized by DNA 2.0 Technologies and subcloned into the Hind III and Not I restriction sides of the pcDNA5 FRT TO vector (Invitrogen) and used to create stable U2OS FlpIn TREx cell lines over-expressing mouse Notch1 receptors. Cells were stably transfected using the Fugene transfectant reagent and maintained in accordance with Invitrogen's 293 FlpIn (TREx) cell line protocol. Cells were selected for and maintained in DMEM high glucose with 10% FBS, 1× Pen-Strep, and 100 ug/ml Hygromycin.

c. Selectivity and Potency of Notch Antibodies Using Co-Culture Reporter Assays

[0810] The ability of anti-Notch Mabs to antagonize the release of the ligand-dependent Notch Intracellular Domain (NICD) of Notch receptors was tested in a 96-well plate format using U2OS FlpIn (TREx)-Notch-Gal4 cells transfected with a pFR-Luc reporter plasmid (Stratagene) and co-cultured for 24 hours with ligand-overexpressing 3T3 cells. Each of the U2OS FlpIn TREx-Notch cell lines were generated by stably transfecting pcDNA5 plasmids encoding the respective human Notch-Gal4 chimera receptors (Notch1, -2, and -3). The full-length mouse Notch1 stably transfected in U2OS FlpIn (TREx) cells was generated using the same transfection protocol as the human Notch chimera receptors. For the assay, U20S-Notch-Gal4 cells were transiently transfected with a pFR-Luc reporter plasmid (Stratagene) driven by a 5X-UAS Gal-4-interacting promoter on day 1; then, on day 2 cells were treated with dox in the presence or absence of Notch Mabs and IgG control, and co-cultured for 24 hours with Jag2-overexpressing 3T3 cells (1.5×10⁴/well) seeded in 96-well plates. Activity of luciferase was measured in cell lysates with Bright-Glo assay kit (Promega). In the mouse Notch1 reporter assay, transactivation of the luciferase reporter gene was driven by the 4× promoter which binds to the endogenous CSL transcription factor. The anti-Notch Mabs of the invention selectively blocked Notch1 (FIG. 9A), but not Notch-2 (FIG. 9B) or Notch-3 (FIG. 9C) luciferase activity. The potency of the Mabs (IC₅₀ₛ) was determined using serial dilutions of the Mabs to generate sigmoid IC₅₀ curves. IC₅₀ values were determined using a 3-parameter logistic curve fit with the top fixed at 100. The Mabs inhibit specific Notch1 signaling with a wide range of potencies varying from IC₅₀ values of less than 1 nM to greater than 100 nM (FIG. 9E, Table 3). Some of the Mabs did not block Notch1 signaling in the reporter assay even though they showed binding to Notch1 by FACS (not shown). The Mabs were also tested for their capacity to block signaling in U2OS FlpIn TREx cells stably transfected with the mouse Notch1 receptor. In these experiments, the Notch antibodies at a concentration of 166 nM blocked luciferase signal in the range from 26% to 81% of the maximal fold stimulation in the co-culture conditions without antibody treatment (FIG. 9D).

### Example 14

### The 10k Membranome Collection of Phage-Ab

[0811] We define as Membranome the ensemble of human genes coding for proteins associated to the cell membrane. We built up a collection of phage-Ab binding the Membranome proteins by high-throughput in vitro screening of naïve phage-Ab libraries using various cell lines as “selectors”. Membrane Proteins (MPs) expressed on the cell surface maintain their native features: folding, post-translation modification, expression of splicing variants and formation of multimeric complexes. In addition, cultured cell lines are reagents easily available with reproducible properties. The workflow adopted to build up the Membranome phage-Ab collection is schematically described in FIG. 10. Three naïve phage-Ab libraries were used in this work which have been derived from B cells of human healthy donors and include over 10¹⁰ different clones each (Cambridge Antibody Technology DP47, BMV, CS). These libraries were independently panned on 64 different human cell lines derived from 25 different tissues (see Table 4). Phage-Abs from each selected pool were individually screened by cell-ELISA for their ability to bind the selector cell line. Positive clones with a novel VH-CDR3 sequence were progressively added to the 10k Membranome phage-Ab collection. Automation of this process enabled a high throughput screening.

[0812] Briefly, libraries of scFv displayed on filamentous phage were obtained from Cambridge Antibody Technology. These libraries (DP47, BMV and CS) were derived from B cells of healthy donors and each of them includes more than 10¹⁰ different clones each. Each phage-Ab library (about 10¹¹ TU) was independently panned on 64 different cell lines (listed in Table 4). In each selection phage libraries were incubated with MPBS (3% powdered milk in PBS solution) for 30 min at room temperature (RT). Human cells used in the selection were detached from the plate using 2.5 mM EDTA in PBS and re-suspended to a final concentration of 1×10⁷ cells/mL. Following centrifugation, cells were re-suspended with pre-adsorbed phage-Abs solution and incubated for 1 hour at RT. After extensive washing with PBS, cell-bound phage were centrifuged 5 min at 2 krpm and resuspended in 800 μL of trypsin solution (1 μg/ml in sodium phosphate). E. Coli TG1 cells (New England Biolabs, Beverly, Mass.) were infected with eluted phage and plated on 2XTY agar containing 2% glucose and 100 μg/mL ampicillin (2XTYAG). Phage rescue and amplification was carried out as described (Hegmans et al 2002; J Immunol Methods 262: 191-204. The selected phage were panned again on the same cell line. A variable number of clones (in the range 100-1,000) were randomly chosen form the pool of selected phage and tested by phage ELISA for their ability to bind the same cell line.

a. Screening the Membranome Collection for Notch1 Ligands

[0813] The 10k Membranome phage-Ab collection is a “specialized”, low-complexity library composed by clones binding receptors expressed in their native form on the cell surface. This collection can be surveyed to rapidly identify antibodies binding epitopes of known cell-surface receptors. We screened the Membranome to identify phage-Abs binding the extra-cellular domain of Notch1. As a selector molecule we decided to avoid using a recombinant extra-cellular domain of the receptor. We chose to use the Notch1 receptor expressed in its natural environment, i.e. on the cell surface. This format is anticipated to preserve the active conformation of the receptor and include all the post-translational modifications. Using a Notch1 expressing cell implies, however, that many other different receptors will be displayed on the cell surface. We therefore used a differential selection system to focus our screening on Notch1 receptor. A stable cell line pcDNA5/FRT/TO-HN1+FLAG expressing Notch1 under the control of doxycyclin-responsive promoter (293_N1) was used after doxycyclin induction for 48 hrs at 100 ug/ml (test sample). The corresponding parental cell line 293TREX FLIP was used as control (293; reference sample). Panning the Membranome phage-Ab collection on test and on reference samples generated two phage populations. The goal is to identify clones preferentially or exclusively present in the test as compared to the reference population.

[0814] We estimate that the complexity of each pool is about 5,000 clones. This number makes very difficult testing the binding specificity of individual clones from each of the two populations and would anyway require a large number of transfected cells

[0815] As an alternative approach, sequencing a number of clones from the test and the reference population of phage-Ab would reveal clones which are differentially represented in the two pools. Clearly, a statistically significant comparison of the two populations would require a very large number of sequences. To efficiently acquire this information we developed a novel DNA-based screening technology we called tagArray.

[0816] First we designed a set of short oligonucleotides that could be used as tags and cloned each single tag into each phagemid coding for a phage-Ab. These tags were cloned in each phagemid coding for a phage-Ab. In this way we generate an association between a specific tag and a specific scFv sequence. This made possible to measure the frequency of each scFv clone in a population by measuring the frequency of the associated tag. The latter can be measured en masse by DNA microarray analysis.

[0817] The tagArray technology enables the efficient and sensitive comparative analysis of the entire populations using minimal amounts of selector samples. The screening protocol articulates in four steps: i) the tagged 10k Membranome phage population was panned in parallel on test and reference sample generating two distinct phage populations (Notch and mock phage population, respectively); ii) tag sequences were amplified from the Notch and the mock phage populations, labeled with Cy5 or Cy3 fluorochromes and hybridized on a double channel DNA microarray containing the complete repertoire of tag sequences; iii) analysis of the hybridization data identified the tags differentially represented in the two populations; iv) the scFv associated to the relevant tags are retrieved from the phage population.

b. TagArray Repertoire

[0818] There were identified 12 sequences sharing the following properties: i) 7 nucleotides long; ii) G2W5 base composition; iii) do not contain G-C palindromes; iv) do not contain self complementary sequences; v) have the same melting temperature, which is 10° C. lower as compared to each of the other 11 sequences. By combining 4 of these building blocks we generated a repertoire of 20,736 (12⁴) sequences of 28 nucleotides. Each member of this repertoire has a 10° C. difference or higher in Tm with any other member of the repertoire.

c. Tagging 10k Membranome

[0819] We synthesized 2 sets of 144 oligos with the following structure

Forward
5′-[BLOCK-C][BLOCK-D] GAACGACCGAGCGCAGCGAGTCA-3′

[0820] BLOCK indicates the upper strand of any of the 12 sequence we identified
[0821] The sequence at its 3′ is complementary to the region of the pCANTAB vector

Reverse
3′-[block-a][block-b]-GGCTGCGGCGAAGCGGTATCAGCT-5′

[0822] block indicates the lower strand of any of the 12 sequences we identified
[0823] The sequence at its 3′ is complementary to the region of the pCANTAB

PCANTAB
AGCTGATACCGCTCGCCGCAGCCGAACGACCGAGCGCAGCGAGTCA

[symbol]

[0824] We assembled an inverse-PCR reaction in 96 well plates containing a unique combination of the forward and reverse primers (5pmols each), 3% DMSO, 200 nM dNTPs, 0.65 units Taq polymerase in 50 uL final volume of HF buffer). Individual bacterial clones from the Membranome collection were included in each well. And processed according to the following thermal profile (98° C. for 3; 98° C. for 30″, 68° C. for 30″, 72° C. for 3′ (24 cycleS); 72° C. for 10″. About 5 uL of each PCR product was digested with DpnI for 2 hrs at 37° C. and inactivated for 20 min at 80° C. An aliquot of the reaction was then ligated overnight at 14° C. with T4 DNA ligase. Following ligase inactivation, the mix was electroporated in TG1 cells which were incubated overnight at 30° C.

d. Panning 10k Membranome

[0825] Phage from the Membranome collection, 293_N1 cells induced with doxycyclin for 48 hrs at 100 ug/ml and 293 cells were incubated in PBSM (3% non-fat dry milk in PBS) for 30 min. Then about 1×10exp10 TU from the 10k Membranome phage-Ab collection were panned for 30 min at 37° C. with 293-N1 or 293 cells. Following extensive washing, cell-bound phage were eluted by proteolytic cleavage and amplified by infection of TG1 cells.

e. Amplification Tag Sequences

[0826] The Ampicillin-resistant bacterial colonies were collected and phagemid DNA purified by DNA purification kit (Qiagen GmbH, Hilden, Germany). Tag sequences were amplified by PCR. Forward primer was 5′-labelled with Cy5 or Cy3 dyes. Reaction mix included 30 ng phagemid DNA, 5 μM labeled forward and reverse primers, 200 uM dNTPs and 2.5 units Taq polymerase (Promega, Madison, Wis.) in a final 50 μL volume. Nine explicitly tagged-phagemids with different relative ratios and absolute amounts were added to the reaction. These “spike in” probes allowed monitoring that the amplification process maintained the original relative frequencies of the clones in the amplified population. The amplification product was first purified from salts, free primers and dNTPs by a commercially available removal kit (Qiagen GmbH, Hilden, Germany). An aliquot was then run onto an agarose gel and the Cy5- or Cy3-labeled fragment was quantified by a fluorescence scanner (Typhoon; Perkin Elmer, Waltham, Mass.).

[0827] The Hybridization mix was assembled in 490 μL final volume containing 3.5 mM Cy5- and Cy-3 labelled probes, 0.5 μM blocker-1 and reverse primer. The latter perfectly hybridizes to the phagemid sequences flanking the tag, thus allowing the tag to interact with complementary tag sequences immobilized on the microArray chip (Agilent Technologies, Palo Alto, Calif.). The reaction mix was incubated at 99.9° C. for 2 minutes and then snap-cooled by transferring back in ice for 1 min. The mix was then applied onto tagArray_{—}44k chip and incubated at 64° C. for 15 hours in a rotating chamber. Then the slide was then washed at RT in 6× SSPEL (6× SSPE, 0.005% N-Lauroylsarcosine), 0.06× SSPEL, rinsed in stabilization and drying solution (Agilent Technologies, Palo Alto, Calif.) and analyzed with Agilent scanner. Images were acquired at 10 μm resolution using an Agilent scanner, with the XDR option enabled (eXtended Dynamic Range: for each slide two images were generated with photomultiplier tube voltages of 100 and 10, respectively). Images were then processed using the Feature Extraction software (v 9.1, Agilent Technologies, Palo Alto, Calif.) generating the net signal for each channel (Cy3 and Cy5) and p-values after background and dye-bias correction. Results reported were obtained by combining data from two independent fluor reversal experiments. The scatter plot derived from this analysis is reported in FIG. 11. Each dot is defined by the log 2 of its ratio between the 293-Notch and the 293 derived tag probes, and by the log 2 of the average of the same values. We filtered the data arbitrarily selecting the following criteria: p<10exp-4, log 2(ratio)>2.6 and log 2(average intensity)>10.7. The orange dots in FIG. 11 refer to clones which fulfilled these criteria. We selected 14 clones with highest ratio and analyzed the corresponding phage-Ab for their binding to 293-N1 and 293 cells by flow cytometry. These clones were converted to IgGs as described in example 16 to confirm binding by FACS and reporter activity in functional assays (Table 5).

### Example 15

### Analysis of the Selected Clones

[0828] a. Whole-Cell Phage-ELISA

[0829] Clones were analyzed as described in Section I-Example 5. Phage-Abs whose binding to the target cell line measured by A_{450 nm}-A_{620 nm} was at least three fold higher than that observed with an unrelated phage and higher than 0.3 units were defined as positive.

b. FACS Analysis (IgG Format)

[0830] Clones were analyzed as described in Section I-Example 12. We analyzed the corresponding Mabs for their binding to 293-N1, -N3 and 293 parental cells by flow cytometry. Three clones were N1-specific (see Table 5), and three (e.g., C2-514, D-268, and A673-C2-110) did cross-react with Notch-3 expressing cells.

c. Reporter Assays

[0831] The Abs selected for conversion were tested for their ability to inhibit Notch1, -2, and -3 signaling as described in the Example 13. Results are reported in the Table 5

### Example 16

[0832] Conversion of scFv Leads into IgGs

[0833] The conversion to IgG of the scFv selected clones (based on FACS analysis) was performed as described in Example 8. The scFv variable region DNA and aminoacid sequences are outlined in Appendix IX. As indicated, the selected clones were grouped in different buckets depending on their capability to bind or not bind the negative regulatory region (NRR) of the Notch1 receptor.

### Example 17

### Activity of Antibodies Against Notch-1 Receptors Bearing NRR Mutations

[0834] Notch-1 receptors bearing different T-ALL-associated mutations within the negative regulatory region (NNR) typically exhibit ligand-independent activation (i.e., spontaneous release of NICD). Ligand-independent signaling by these mutated forms of Notch-1 was evaluated in both the presence and absence of antibodies of the invention that bind to the negative regulatory region (NNR) of the receptor.

[0835] In a 96-well format, U2OS cells were transiently transfected with full-length Notch-1 cDNA constructs encoding specific mutations that cause spontaneous activation of the receptor and the consequent activation of the Notch signaling pathway. Immediately post-transfection with the mutated Notch receptor and the 4XCSL-luciferase reporter gene, inhibitory or control antibodies (10 ug/ml) were added and the luciferase signal was measured in cell lysates at 24 h with Bright-Glo assay kit (Promega). U2OS cells transient transfected with the wild-type receptor were used as the baseline control to express fold-induction secondary to spontaneous release of NICD. The intrinsic activity of the different receptors bearing Class I mutations (i.e., those that promote heterodimer dissociation) was very sensitive to antibodies (e.g., WC-75) binding to the NRR region (FIG. 12A). In contrast, signaling by Notch1 receptors with Class II mutations (i.e., tandem insertions that duplicate the S2 cleavage) was not significantly affected by treatment with these antibodies (FIG. 12B).

### Summary of Tables:

[0836] Table 1: Notch1 antibody EC₅₀ values calculated using titration ELISA
[0837] Table 2: Notch1 antibody kinetic constants calculated using BIAcore analysis
[0838] Table 3: Summary of monoclonal antibody activity
[0839] Table 4: Human cell lines used for selecting Membranone phage-Ab collection
[0840] Table 5: Summary of monoclonal antibody activity—from Membranome panning

### Summary of Appendices:

[0841] Appendix I: Notch1 DNA Sequence (Notch1+FLAG TAG)
[0842] Appendix II: Notch1 Protein Sequence (Notch1+FLAG TAG)
[0843] Appendix III: Group I antibodies-Notch1 specific—Generated directly from a phage display library
   [0844] A. Amino Acid Sequence
      [0845] A.1. Binding to LBD (N1-EGF 1-13) (SEQ ID NOS: 3-22 Hc & 23-42 Lc)
      [0846] A.2. Binding to NRR (SEQ ID NOS: 43-45 Hc & 46-28 Lc)
      [0847] A.3. Additional Notch Antibodies
   [0848] B. DNA Sequence
      [0849] B.1. Binding to LBD (N1-EGF 1-13) (SEQ ID NOS: 105-124 Hc & 125-144 Lc)
      [0850] B.2. Binding to NRR (SEQ ID NOS: 145-147 Hc and 148-150 Lc)
      [0851] B.3. Additional Notch Antibodies
   [0852] C. CDR (Amino Acid Sequence)
      [0853] C.1. Binding to LBD (N1-EGF 1-13)
      [0854] C.2. Binding to NRR
      [0855] C.3. Additional Notch Antibodies
[0856] Appendix IV: Group II antibodies—Bind to both Notch1/Notch3
   [0857] A. Amino Acid Sequence
   [0858] B. DNA Sequence
   [0859] C. CDR (Amino Acid Sequence)
[0860] Appendix V: Constant Region DNA Sequences
[0861] Appendix VI: Constant Region Protein Sequences
[0862] Appendix VII: Leader DNA Sequences
[0863] Appendix VIII: Leader Protein Sequences
[0864] Appendix IX: Group I Antibodies-Notch1 specific—Generated from the Membranome library
   [0865] A. Amino Acid Sequence
      [0866] A.1. Binding to NRR
      [0867] A.2. Additional Notch Antibodies
   [0868] B. DNA Sequence
      [0869] B.1. Binding to NRR
      [0870] B.2. Additional Notch Antibodies
   [0871] C. CDR (Amino Acid Sequence)
      [0872] C.1. Binding to NRR
      [0873] C.2. Additional Notch Antibodies

TABLE 1
Notch1 antibody EC₅₀ values calculated using a titration ELISA

| Mab Name | Binding Epitope | Binding EC50, nM |
|---|---|---|
| WC-75 | LNR-HD | 62.62 |
| WC-629 | LNR-HD | 5.50 |
| WC-133 | Notch1 (EGF 1-13) | 0.17 |
| WC-159 | Notch1 (EGF 1-13) | 0.12 |
| WC-49 | Notch1 (EGF 1-13) | 0.60 |

TABLE 2
Notch1 antibody kinetic constants calculated using BIAcore analysis

| | 1:1 binding | | |
|---|---|---|---|
| Mab (ID) | Kon (1/M · s) | Koff (1/s) | K_{D} (M) |
| HN1S3-133 | 6.16E+05 | 4.00E−04 | 6.49E−10 |
| HN1S3-147 | 1.06E+06 | 2.85E−04 | 2.69E−10 |
| HN1S3-13 | 5.97E+05 | 0.002937 | 4.92E−09 |
| HN1S3-56 | 5.17E+05 | 0.002918 | 5.65E−09 |
| HN1S3-94 | 4.20E+05 | 0.001632 | 3.89E−09 |
| HN1S3-9 | 5.13E+05 | 0.002681 | 5.23E−09 |
| hN1wc-97 | 5.56E+04 | 4.38E−04 | 7.87E−09 |
| hN1wc-155 | 1.66E+05 | 2.90E−04 | 1.74E−09 |
| hN1wc-168 | 4.86E+05 | 0.002281 | 4.70E−09 |
| hN1wc-173 | 1.37E+05 | 4.47E−04 | 3.27E−09 |
| hN1wc-179 | 4.93E+05 | 0.003628 | 7.36E−09 |
| hN1wc-613 | 2.37E+05 | 2.58E−04 | 1.09E−09 |
| hN1wc-49 | 9.89E+05 | 0.1605 | 1.62E−07 |
| Hn1WC-133 | 1.57E+05 | 2.60E−04 | 1.66E−09 |

TABLE 3

| | | hN1 | | | |
|---|---|---|---|---|---|
| Mab ID | hN1-FACS^{a, b} | (IC₅₀, nM) | hN2^{c} | hN3^{c} | mN1^{d} |
| WC-75 | ++++ | 0.023 | <10% | <10% | +++ |
| WC-629 | +++ | 2.1 | <10% | <10% | ++ |
| WC-613 | ++ | 3.9 | <10% | <10% | +++ |
| S3-009 | ++ | 12 | <10% | <20% | ++ |
| S3-094 | ++ | 13 | <10% | <10% | ++ |
| WC-133 | ++ | 15 | <10% | <10% | ++ |
| WC-173 | ++ | 21 | <20% | <20% | +++ |
| S3-013 | + | 25 | <10% | <10% | + |
| S3-056 | + | 35 | <10% | <10% | ++ |
| S3-011 | ++ | 50 | <10% | <10% | + |
| WC-155 | ++ | 61 | <10% | <10% | ++ |
| WC-168 | + | 114 | <10% | <10% | ++ |
| WC-159 | +++ | 147 | <10% | <10% | ++ |
| WC-97 | + | 152 | <10% | <10% | ++ |

^{a}hN1, mN1 represent human and mouse Notch1, respectively.
^{b}Binding of Notch Mabs to 293 FlipIn (TREx) cells stably expressing hN1: (−) MFI < 11; (+) MFI = 11-100; (++) MFI = 101-500; (+++) MFI = 501-999; (++++) MFI > 1000
^{c}Inhibition of Luc activity at [166 nM] Mab in the Notch human reporter assay: (−) <20%;
^{d}Inhibition of Luc activity at [166 nM] Mab in the mouse reporter assay: (−) <20%; (+) = 21-30%; (++) = 31-60%; (+++) = 61-90%; (++++) >90%

TABLE 4
Human cell lines used for selecting Membranome phage-Ab collection

| Cell line^{a} | Tissue | Clones |
|---|---|---|
| A549 | lung | 137 |
| HCT-116 | colon | 50 |
| HL-60 | blood | 57 |
| SW480 | colon | 302 |
| G-361 | skin | 17 |
| T-47D | breast | 46 |
| HT-3 | cervix | 4 |
| WiDr | colon | 258 |
| MDA-MB-231 | breast | 118 |
| MDA-MB-468 | breast | 35 |
| BT-474 | breast | 9 |
| 143B | bone | 59 |
| AGS | stomach | 268 |
| SW620 | colon | 247 |
| LN405 | brain | 34 |
| PerC-6 | retina | 39 |
| HeLa | cervix | 169 |
| RKO | | 192 |
| A-498 | kidney | 2 |
| MIA-PaCa-2 | pancreas | 232 |
| MSTO-211H | lung | 57 |
| SK-CO1 | colon | 151 |
| MG63 | bone | 440 |
| CAL-120 | breast | 426 |
| SK-N-AS | brain | 350 |
| A-375 | skin | 95 |
| PANC02.03 | pancreas | 203 |
| LNZTA3WT4 | brain | 146 |
| A498 | kidney | 2 |
| U-2OS | bone | 181 |
| 5637 | urinary bladder | 114 |
| A-673 | muscle | 381 |
| G-402 | kidney | 340 |
| JEG-3 | placenta | 210 |
| T98G | brain | 251 |
| MCF7 | breast | 303 |
| NCI-H292 | lung | 51 |
| KATOIII | stomach | 197 |
| KG-1 | bone marrow | 88 |
| PC-3M-luc-C6 | prostate | 231 |
| CAL-27 | tongue | 151 |
| Caov-3 | ovary | 180 |
| HEK293T/17 | kidney | 99 |
| HepG2 | liver | 367 |
| K-562 | bone marrow | 68 |
| A-204 | muscle | 323 |
| A2780 | ovary | 197 |
| A2058 | skin | 224 |
| OAW42 | ovary | 67 |
| C32 | skin | 155 |
| AN3CA | uterus | 129 |
| J82 | urinary bladder | 55 |
| NCI-H460 | lung | 127 |
| SKOV-3 | ovary | 244 |
| DAOY | brain | 129 |
| A-431 | skin | 28 |
| HPAF-II | pancreas | 107 |
| LS1034 | cecum | 48 |
| HUVEC | umbelicalvein | 198 |
| Hs766T | pancreas | 31 |
| HUH7.5 | liver | 395 |
| | Total | 9,925 |

^{a}Cell lines are listed according to the order they have been used to select the Membranome phage-Ab collection.

TABLE 5
Summary of monoclonal antibody activity -Membranome panning

| | hN1- | hN1^{c} | | |
|---|---|---|---|---|
| Mab ID | FACS^{a, b} | (IC₅₀, nM) | hN2^{c, d} | hN3^{c, d} |
| A2780-C2-16 | ++++ | 0.583 | <15% | <15% |
| JEG-C2-11 | ++++ | 0.299 | <5% | <5% |
| C2-384 | +++ | >333 | <5% | <5% |
| C2-514 | ++++ | >333 | <5% | <5% |
| D2-268 | ++++ | >333 | <5% | <5% |
| A673-C2-110 | ++ | >333 | <15% | <10% |

^{a}hN1 represents human Notch1
^{b}Binding of Notch Mabs to 293 FlipIn (TREx) cells stably expressing hN1: (−) MFI < 11; (+) MFI = 11-100; (++) MFI = 101-500; (+++) MFI = 501-999; (++++) MFI > 1000
^{c}Reporter assays
^{d}Inhibition of Luc activity at [166 nM] Mab: (−) ≦20%

### APPENDIX

APPENDIX I
Notch1 DNA Sequence (Notch1 + FLAG TAG)

ATGCCCCCCCTGCTGGCCCCCCTGCTGTGCCTGGCCCTGCTGCCTGCCCTGGCTGCCCGGGGCCCCCGGTGCTCCCA
GCCTGGCGAGACCTGCCTGAATGGCGGCAAGTGTGAGGCTGCCAATGGCACAGAGGCCTGTGTCTGTGGCGGCGCCT
TTGTGGGCCCCCGGTGCCAGGACCCCAACCCATGCCTGAGCACCCCATGCAAGAATGCTGGCACCTGCCATGTGGTG
GACCGGCGGGGCGTGGCTGACTATGCCTGCTCCTGTGCCCTGGGCTTCTCTGGCCCCCTGTGCCTGACCCCCCTGGA
CAATGCCTGCCTGACCAACCCATGCCGGAATGGCGGCACCTGTGACCTGCTGACCCTGACAGAGTACAAGTGCCGGT
GCCCCCCTGGCTGGTCTGGCAAGAGCTGCCAGCAGGCTGACCCATGTGCCTCCAACCCATGTGCCAATGGCGGCCAG
TGCCTGCCATTTGAGGCCAGCTACATCTGCCACTGCCCCCCATCCTTCCATGGCCCCACCTGCCGGCAGGATGTGAA
TGAGTGTGGCCAGAAGCCTGGCCTGTGCCGGCATGGCGGCACCTGCCACAATGAGGTGGGCAGCTACCGGTGTGTCT
GCCGGGCCACCCACACAGGCCCCAACTGTGAGCGGCCATATGTGCCATGCTCCCCAAGCCCATGCCAGAATGGCGGC
ACCTGCCGGCCCACAGGCGATGTGACCCATGAGTGTGCCTGCCTGCCTGGCTTCACAGGCCAGAACTGTGAGGAGAA
CATTGATGACTGCCCTGGCAACAACTGCAAGAATGGCGGCGCCTGTGTGGATGGCGTGAACACCTACAACTGCCGGT
GCCCCCCTGAGTGGACAGGCCAGTACTGCACAGAGGATGTGGATGAGTGCCAGCTGATGCCCAATGCCTGCCAGAAT
GGCGGCACCTGCCACAACACCCATGGCGGCTACAACTGTGTCTGTGTGAATGGCTGGACAGGCGAGGACTGCTCTGA
GAACATTGATGACTGTGCCTCTGCTGCCTGCTTCCATGGCGCCACCTGCCATGACCGGGTGGCCTCCTTCTACTGTG
AGTGCCCCCATGGCCGGACAGGCCTGCTGTGCCATCTGAATGATGCCTGCATCAGCAACCCATGCAATGAGGGCTCC
AACTGTGACACCAACCCTGTGAATGGCAAGGCCATCTGCACCTGCCCATCTGGCTACACAGGCCCTGCCTGCTCCCA
GGATGTGGATGAGTGCAGCCTGGGCGCCAACCCATGTGAGCATGCTGGCAAGTGCATCAACACCCTGGGCTCCTTTG
AGTGCCAGTGCCTGCAAGGCTACACAGGCCCCCGGTGTGAGATTGATGTGAATGAGTGTGTCAGCAACCCATGCCAG
AATGATGCCACCTGCCTGGACCAGATTGGCGAGTTCCAGTGCATCTGCATGCCTGGCTATGAGGGCGTGCACTGTGA
GGTGAACACAGATGAGTGTGCCTCCAGCCCATGCCTGCACAATGGCCGGTGCCTGGACAAGATCAATGAGTTCCAGT
GTGAGTGCCCCACAGGCTTCACAGGCCATCTGTGCCAGTATGATGTGGATGAGTGTGCCTCCACCCCATGCAAGAAT
GGCGCCAAGTGCCTGGATGGCCCCAACACCTACACCTGTGTCTGCACAGAGGGCTACACAGGCACCCACTGTGAGGT
GGACATTGATGAGTGTGACCCTGACCCATGCCACTATGGCAGCTGCAAGGATGGCGTGGCCACCTTCACCTGCCTGT
GCCGGCCTGGCTACACAGGCCATCACTGTGAGACCAACATCAATGAGTGCTCCAGCCAGCCATGCCGGCATGGCGGC
ACCTGCCAGGACCGGGACAATGCCTACCTGTGCTTCTGCCTGAAGGGCACCACAGGCCCCAACTGTGAGATCAACCT
GGATGACTGTGCCTCCTCCCCATGTGACTCTGGCACCTGCCTGGACAAGATTGATGGCTATGAGTGTGCCTGTGAGC
CTGGCTACACAGGCAGCATGTGCAACATCAACATTGATGAGTGTGCTGGCAACCCATGCCACAATGGCGGCACCTGT
GAGGATGGCATCAATGGCTTCACCTGCCGGTGCCCTGAGGGCTACCATGACCCCACCTGCCTGTCTGAGGTGAATGA
GTGCAACTCCAACCCATGTGTGCATGGCGCCTGCCGGGACAGCCTGAATGGCTACAAGTGTGACTGTGACCCTGGCT
GGTCTGGCACCAACTGTGACATCAACAACAATGAGTGTGAGTCCAACCCATGTGTGAATGGCGGCACCTGCAAGGAC
ATGACCTCTGGCTATGTCTGCACCTGCCGGGAGGGCTTCTCTGGCCCCAACTGCCAGACCAACATCAATGAGTGTGC
CAGCAACCCATGCCTGAACCAGGGCACCTGCATTGATGATGTGGCTGGCTACAAGTGCAACTGCCTGCTGCCATACA
CAGGCGCCACCTGTGAGGTGGTGCTGGCCCCATGTGCCCCATCCCCATGCCGGAATGGCGGCGAGTGCCGGCAGTCT
GAGGACTATGAGAGCTTCTCCTGTGTCTGCCCCACAGGCTGGCAGGCTGGCCAGACCTGTGAGGTGGACATCAATGA
GTGTGTGCTGAGCCCATGCCGGCATGGCGCCTCCTGCCAGAACACCCATGGCGGCTACCGGTGCCACTGCCAGGCTG
GCTACTCTGGCCGGAACTGTGAGACAGACATTGATGACTGCCGGCCCAACCCATGCCACAATGGCGGCTCCTGCACA
GATGGCATCAACACAGCCTTCTGTGACTGCCTGCCTGGCTTCCGGGGCACCTTCTGTGAGGAGGACATCAATGAGTG
TGCCTCTGACCCATGCCGGAATGGCGCCAACTGCACAGACTGTGTGGACAGCTACACCTGCACCTGCCCTGCTGGCT
TCTCTGGCATCCACTGTGAGAACAACACCCCTGACTGCACAGAGTCCAGCTGCTTCAATGGCGGCACCTGTGTGGAT
GGCATCAACTCCTTCACCTGCCTGTGCCCCCCTGGCTTCACAGGCAGCTACTGCCAGCATGATGTGAATGAGTGTGA
CTCCCAGCCATGCCTGCATGGCGGCACCTGCCAGGATGGCTGTGGCAGCTACCGGTGCACCTGCCCCCAGGGCTACA
CAGGCCCCAACTGCCAGAACCTGGTGCACTGGTGTGACTCCAGCCCATGCAAGAATGGCGGCAAGTGCTGGCAGACC
CACACCCAGTACCGGTGTGAGTGCCCATCTGGCTGGACAGGCCTGTACTGTGATGTGCCATCTGTCTCCTGTGAGGT
GGCTGCCCAGCGGCAGGGCGTGGATGTGGCCCGGCTGTGCCAGCATGGCGGCCTGTGTGTGGATGCTGGCAACACCC
ATCACTGCCGGTGCCAGGCTGGCTACACAGGCAGCTACTGTGAGGACCTGGTGGATGAGTGCTCCCCAAGCCCATGC
CAGAATGGCGCCACCTGCACAGACTACCTGGGCGGCTACTCCTGCAAGTGTGTGGCTGGCTACCATGGCGTGAACTG
CTCTGAGGAGATTGATGAGTGCCTGAGCCATCCATGCCAGAATGGCGGCACCTGCCTGGACCTGCCCAACACCTACA
AGTGCTCCTGCCCCCGGGGCACCCAGGGCGTGCACTGTGAGATCAATGTGGATGACTGCAACCCCCCTGTGGACCCT
GTCAGCCGGTCCCCCAAGTGCTTCAACAATGGCACCTGTGTGGACCAGGTGGGCGGCTACTCCTGCACCTGCCCCCC
TGGCTTTGTGGGCGAGCGGTGTGAGGGCGATGTGAATGAGTGCCTGAGCAACCCATGTGATGCCCGGGGCACCCAGA
ACTGTGTGCAGCGGGTGAATGACTTCCACTGTGAGTGCCGGGCTGGCCACACAGGCCGGCGGTGTGAGTCTGTGATC
AATGGCTGCAAGGGCAAGCCATGCAAGAATGGCGGCACCTGTGCTGTGGCCTCCAACACAGCCCGGGGCTTCATCTG
CAAGTGCCCTGCTGGCTTTGAGGGCGCCACCTGTGAGAATGATGCCCGGACCTGTGGCAGCCTGCGGTGCCTGAATG
GCGGCACCTGCATCTCTGGCCCCCGGTCCCCCACCTGCCTGTGCCTGGGCCCATTCACAGGCCCTGAGTGCCAGTTC
CCTGCCAGCTCCCCATGCCTGGGCGGCAACCCATGCTACAACCAGGGCACCTGTGAGCCCACCTCTGAGTCCCCATT
CTACCGGTGCCTGTGCCCTGCCAAGTTCAATGGCCTGCTGTGCCACATCCTGGACTACAGCTTTGGCGGCGGCGCTG
GCCGGGACATCCCCCCCCCCCTGATTGAGGAGGCCTGTGAGCTGCCTGAGTGCCAGGAGGATGCTGGCAACAAGGTC
TGCTCCCTCCAGTGCAACAACCATGCCTGTGGCTGGGATGGCGGCGACTGCTCCCTGAACTTCAATGACCCATGGAA
GAACTGCACCCAGAGCCTGCAATGCTGGAAGTACTTCTCTGATGGCCACTGTGACTCCCAGTGCAACTCTGCTGGCT
GCCTGTTTGATGGCTTTGACTGCCAGCGGGCTGAGGGCCAGTGCAACCCCCTGTATGACCAGTACTGCAAGGACCAC
TTCTCTGATGGCCACTGTGACCAGGGCTGCAACTCTGCTGAGTGTGAGTGGGATGGCCTGGACTGTGCTGAGCATGT
GCCTGAGCGGCTGGCTGCTGGCACCCTGGTGGTGGTGGTGCTGATGCCCCCTGAGCAGCTGCGGAACAGCTCCTTCC
ACTTCCTGCGGGAGCTGTCCCGGGTGCTGCACACCAATGTGGTCTTCAAGCGGGATGCCCATGGCCAGCAGATGATC
TTCCCATACTATGGCCGGGAGGAGGAGCTGCGGAAGCATCCCATCAAGCGGGCTGCTGAGGGCTGGGCTGCCCCTGA
TGCCCTGCTGGGCCAGGTGAAGGCCAGCCTGCTGCCTGGCGGCTCTGAGGGCGGCCGGCGGCGGCGGGAGCTGGACC
CCATGGATGTGCGGGGCTCCATTGTCTACCTGGAGATTGACAACCGGCAGTGTGTGCAGGCCAGCTCCCAGTGCTTC
CAGTCTGCCACAGATGTGGCTGCCTTCCTGGGCGCCCTGGCCAGCCTGGGCAGCCTGAACATCCCATACAAGATTGA
GGCTGTGCAGTCTGAGACAGTGGAGCCCCCCCCCCCTGCCCAGCTGCACTTCATGTATGTGGCTGCTGCTGCCTTTG
TGCTGCTGTTCTTTGTGGGCTGTGGCGTGCTGCTGTCCCGGAAGCGGCGGCGGCAGCATGGCCAGCTGTGGTTCCCT
GAGGGCTTCAAGGTCTCTGAGGCCTCCAAGAAGAAGCGGCGGGAGCCCCTGGGCGAGGACTCTGTGGGCCTGAAGCC
CCTGAAGAATGCCTCTGATGGCGCCCTGATGGATGACAACCAGAATGAGTGGGGCGATGAGGACCTGGAGACCAAGA
AGTTCCGGTTTGAGGAGCCTGTGGTGCTGCCTGACCTGGATGACCAGACAGACCATCGGCAGTGGACCCAGCAGCAT
CTGGATGCTGCTGACCTGCGGATGTCTGCCATGGCCCCCACCCCCCCCCAGGGCGAGGTGGATGCTGACTGCATGGA
TGTGAATGTGCGGGGCCCTGATGGCTTCACCCCCCTGATGATTGCCAGCTGCTCTGGCGGCGGCCTGGAGACAGGCA
ACTCTGAGGAGGAGGAGGATGCCCCTGCTGTGATCTCTGACTTCATCTACCAGGGCGCCTCCCTGCACAACCAGACA
GACCGGACAGGCGAGACAGCCCTGCATCTGGCTGCCCGGTACAGCCGGTCTGATGCTGCCAAGCGGCTGCTGGAGGC
CTCTGCTGATGCCAACATCCAGGACAACATGGGCCGGACCCCCCTGCATGCTGCTGTCTCTGCTGATGCCCAGGGCG
TCTTCCAGATCCTGATCCGGAACCGGGCCACAGACCTGGATGCCCGGATGCATGATGGCACCACCCCCCTGATCCTG
GCTGCCCGGCTGGCTGTGGAGGGCATGCTGGAGGACCTGATCAACTCCCATGCTGATGTGAATGCTGTGGATGACCT
GGGCAAGTCTGCCCTGCACTGGGCTGCTGCTGTGAACAATGTGGATGCTGCTGTGGTGCTGCTGAAGAATGGCGCCA
ACAAGGACATGCAGAACAACCGGGAGGAGACCCCCCTGTTCCTGGCTGCCCGGGAGGGCAGCTATGAGACAGCCAAG
GTGCTGCTGGACCACTTTGCCAACCGGGACATCACAGACCACATGGACCGGCTGCCCCGGGACATTGCCCAGGAGCG
GATGCATCATGACATTGTGCGGCTGCTGGATGAGTACAACCTGGTGCGGTCCCCCCAGCTGCATGGCGCCCCCCTGG
GCGGCACCCCCACCCTGTCCCCCCCCCTGTGCAGCCCCAATGGCTACCTGGGCTCCCTGAAGCCTGGCGTGCAGGGC
AAGAAGGTGCGGAAGCCAAGCTCCAAGGGCCTGGCCTGTGGCTCCAAGGAGGCCAAGGACCTGAAGGCCCGGCGGAA
GAAGTCCCAGGATGGCAAGGGCTGCCTGCTGGACTCCAGCGGCATGCTGTCCCCTGTGGACAGCCTGGAGTCCCCCC
ATGGCTACCTGTCTGATGTGGCCAGCCCCCCCCTGCTGCCATCCCCATTCCAGCAGTCCCCATCTGTGCCCCTGAAC
CATCTGCCTGGCATGCCTGACACCCATCTGGGCATTGGCCATCTGAATGTGGCTGCCAAGCCTGAGATGGCTGCCCT
GGGCGGCGGCGGCCGGCTGGCCTTTGAGACAGGCCCCCCCCGGCTGAGCCATCTGCCTGTGGCCTCTGGCACCTCCA
CAGTGCTGGGCAGCTCCTCTGGCGGCGCCCTGAACTTCACAGTGGGCGGCTCCACCAGCCTGAATGGCCAGTGTGAG
TGGCTGTCCCGGCTGCAATCTGGCATGGTGCCCAACCAGTACAACCCCCTGCGGGGCTCTGTGGCCCCTGGCCCCCT
GTCCACCCAGGCCCCAAGCCTGCAACATGGCATGGTGGGCCCCCTGCACTCCAGCCTGGCTGCCTCTGCCCTGTCCC
AGATGATGTCCTACCAGGGCCTGCCAAGCACCCGGCTGGCCACCCAGCCCCATCTGGTGCAGACCCAGCAGGTGCAG
CCCCAGAACCTGCAAATGCAGCAGCAGAACCTGCAACCTGCCAACATCCAGCAGCAGCAGTCCCTCCAGCCCCCCCC
CCCCCCCCCCCAGCCCCATCTGGGCGTCAGCTCTGCTGCCTCTGGCCATCTGGGCCGGTCCTTCCTGTCTGGCGAGC
CAAGCCAGGCTGATGTGCAGCCCCTGGGCCCATCCTCCCTGGCTGTGCACACCATCCTGCCCCAGGAGAGCCCTGCC
CTGCCCACCTCCCTGCCAAGCTCCCTGGTGCCCCCTGTGACAGCTGCCCAGTTCCTGACCCCCCCATCCCAGCACTC
CTACTCCAGCCCTGTGGACAACACCCCATCCCATCAGCTCCAGGTGCCTGAGCATCCATTCCTGACCCCAAGCCCTG
AGTCCCCTGACCAGTGGTCCAGCTCCTCCCCCCACAGCAATGTCTCTGACTGGTCTGAGGGCGTCTCCTCCCCCCCC
ACCAGCATGCAGTCCCAGATTGCCAGAATCCCTGAGGCCTTCAAGGATTACAAGGACGACGATGACAAGTAA
(SEQ ID NO: 1)

APPENDIX II
Notch1 Protein Sequence (Notch1 + FLAG TAG)

MPPLLAPLLCLALLPALAARGPRCSQPGETCLNGGKCEAANGTEACVCGGAFVGPRCQDPNPCLSTPCKNAGTCHVV
DRRGVADYACSCALGFSGPLCLTPLDNACLTNPCRNGGTCDLLTLTEYKCRCPPGWSGKSCQQADPCASNPCANGGQ
CLPFEASYICHCPPSFHGPTCRQDVNECGQKPGLCRHGGTCHNEVGSYRCVCRATHTGPNCERPYVPCSPSPCQNGG
TCRPTGDVTHECACLPGFTGQNCEENIDDCPGNNCKNGGACVDGVNTYNCRCPPEWTGQYCTEDVDECQLMPNACQN
GGTCHNTHGGYNCVCVNGWTGEDCSENIDDCASAACFHGATCHDRVASFYCECPHGRTGLLCHLNDACISNPCNEGS
NCDTNPVNGKAICTCPSGYTGPACSQDVDECSLGANPCEHAGKCINTLGSFECQCLQGYTGPRCEIDVNECVSNPCQ
NDATCLDQIGEFQCICMPGYEGVHCEVNTDECASSPCLHNGRCLDKINEFQCECPTGFTGHLCQYDVDECASTPCKN
GAKCLDGPNTYTCVCTEGYTGTHCEVDIDECDPDPCHYGSCKDGVATFTCLCRPGYTGHHCETNINECSSQPCRHGG
TCQDRDNAYLCFCLKGTTGPNCEINLDDCASSPCDSGTCLDKIDGYECACEPGYTGSMCNINIDECAGNPCHNGGTC
EDGINGFTCRCPEGYHDPTCLSEVNECNSNPCVHGACRDSLNGYKCDCDPGWSGTNCDINNNECESNPCVNGGTCKD
MTSGYVCTCREGFSGPNCQTNINECASNPCLNQGTCIDDVAGYKCNCLLPYTGATCEVVLAPCAPSPCRNGGECRQS
EDYESFSCVCPTGWQAGQTCEVDINECVLSPCRHGASCQNTHGGYRCHCQAGYSGRNCETDIDDCRPNPCHNGGSCT
DGINTAFCDCLPGFRGTFCEEDINECASDPCRNGANCTDCVDSYTCTCPAGFSGIHCENNTPDCTESSCFNGGTCVD
GINSFTCLCPPGFTGSYCQHDVNECDSQPCLHGGTCQDGCGSYRCTCPQGYTGPNCQNLVHWCDSSPCKNGGKCWQT
HTQYRCECPSGWTGLYCDVPSVSCEVAAQRQGVDVARLCQHGGLCVDAGNTHHCRCQAGYTGSYCEDLVDECSPSPC
QNGATCTDYLGGYSCKCVAGYHGVNCSEEIDECLSHPCQNGGTCLDLPNTYKCSCPRGTQGVHCEINVDDCNPPVDP
VSRSPKCFNNGTCVDQVGGYSCTCPPGFVGERCEGDVNECLSNPCDARGTQNCVQRVNDFHCECRAGHTGRRCESVI
NGCKGKPCKNGGTCAVASNTARGFICKCPAGFEGATCENDARTCGSLRCLNGGTCISGPRSPTCLCLGPFTGPECQF
PASSPCLGGNPCYNQGTCEPTSESPFYRCLCPAKFNGLLCHILDYSFGGGAGRDIPPPLIEEACELPECQEDAGNKV
CSLQCNNHACGWDGGDCSLNFNDPWKNCTQSLQCWKYFSDGHCDSQCNSAGCLFDGFDCQRAEGQCNPLYDQYCKDH
FSDGHCDQGCNSAECEWDGLDCAEHVPERLAAGTLVVVVLMPPEQLRNSSFHFLRELSRVLHTNVVFKRDAHGQQMI
FPYYGREEELRKHPIKRAAEGWAAPDALLGQVKASLLPGGSEGGRRRRELDPMDVRGSIVYLEIDNRQCVQASSQCF
QSATDVAAFLGALASLGSLNIPYKIEAVQSETVEPPPPAQLHFMYVAAAAFVLLFFVGCGVLLSRKRRRQHGQLWFP
EGFKVSEASKKKRREPLGEDSVGLKPLKNASDGALMDDNQNEWGDEDLETKKFRFEEPVVLPDLDDQTDHRQWTQQH
LDAADLRMSAMAPTPPQGEVDADCMDVNVRGPDGFTPLMIASCSGGGLETGNSEEEEDAPAVISDFIYQGASLHNQT
DRTGETALHLAARYSRSDAAKRLLEASADANIQDNMGRTPLHAAVSADAQGVFQILIRNRATDLDARMHDGTTPLIL
AARLAVEGMLEDLINSHADVNAVDDLGKSALHWAAAVNNVDAAVVLLKNGANKDMQNNREETPLFLAAREGSYETAK
VLLDHFANRDITDHMDRLPRDIAQERMHHDIVRLLDEYNLVRSPQLHGAPLGGTPTLSPPLCSPNGYLGSLKPGVQG
KKVRKPSSKGLACGSKEAKDLKARRKKSQDGKGCLLDSSGMLSPVDSLESPHGYLSDVASPPLLPSPFQQSPSVPLN
HLPGMPDTHLGIGHLNVAAKPEMAALGGGGRLAFETGPPRLSHLPVASGTSTVLGSSSGGALNFTVGGSTSLNGQCE
WLSRLQSGMVPNQYNPLRGSVAPGPLSTQAPSLQHGMVGPLHSSLAASALSQMMSYQGLPSTRLATQPHLVQTQQVQ
PQNLQMQQQNLQPANIQQQQSLQPPPPPPQPHLGVSSAASGHLGRSFLSGEPSQADVQPLGPSSLAVHTILPQESPA
LPTSLPSSLVPPVTAAQFLTPPSQHSYSSPVDNTPSHQLQVPEHPFLTPSPESPDQWSSSSPHSNVSDWSEGVSSPP
TSMQSQIARIPEAFKDYKDDDDK (SEQ ID NO: 2)

APPENDIX III
Group I - Notch1 specific antibodies

A. Aminoacid sequence
A.1- Binding to LBD (N1-EGF 1-13)

Heavy Chain

| Clone Name | HC-sequences |
|---|---|
| hN1S3- | EVQLVQSGAEVKKPGASVKVSCKASGYNFTGYYMHWVRQAPGQGLEWMGWIN |
| 009 | PNSGGTNYAQKFQGRVTMTRDTSISTAYMELSRLRSDDTAVYYCATDSFDYWGQ |
| | GTMVTVSS (SEQ ID NO: 3) |
| hN1S3- | EVQLVQSGAEVKKPGASVKVSCKASGYNFTGYYMHWVRQAPGQGLEWMGWIN |
| 010 | PNSGGTNYAQKFQGRVIMTRDTSISTAYMELSRLTSDDTAVYYCATDSFDYWGRG |
| | TMVTVSS (SEQ ID NO: 4) |
| hN1S3- | QVQLVQSGPEVKKPGASVKVSCKASGYNFTGYYMHWVRQAPGQGLEWMGWIN |
| 011 | PNSGGTNYAQKFQGRVTMTRDTSISTAYMELSRLRSDDTAVYYCATDSFDYWGR |
| | GTMVTVSS (SEQ ID NO: 5) |
| hN1S3- | EVQLVQSGAEVKKPGASVKVSCKASGYNFTGYYMHWVRQAPGQGLEWMGWIN |
| 013 | PNSGGTNYAQKFQGRVTMTRDTSISTAYMELSRLRSDDTAVYYCATDSFDYWGR |
| | GTLVTVSS (SEQ ID NO: 6) |
| hN1S3- | QVQLVQSGAEVKKPGASVKVSCKASGYNFTGYYMHWVRQAPGQGLEWMGWIN |
| 050 | PNSGGTNYAQKFQGRVTMTRDTSISTAYMELSRLRSDDTAVYYCATDSFDYWGR |
| | GTMVTVSS (SEQ ID NO: 7) |
| hN1S3- | QVQLVQSGAEVKKPGASVRISCKTSGFTFTSYFIHWVRQAPGQRPEWMGVINPSRGN |
| 052 | ADYAPRFRGRVTMTRDKSTHTVYMDLKSLRSDDAAIYYCARDRLGGLLDYYDSSDSSK |
| | NFDAFDFWGQGTLVTVSS (SEQ ID NO: 8) |
| hN1S3- | EVQLVQSGAEVKKPGASVKVSCKASGYNFTGYYMHWVRQAPGQGLEWMGWIN |
| 094 | PNSGGTNYAQKFQGRVTMTRDTSISTAYMELSRLRSDDTAVYYCATDSFDYWGR |
| | GTMVTVSS (SEQ ID NO: 9) |
| hN1S3- | EVQLVQSGAEVKKPGASVKVSCKASGYNFTGYYMHWVRQAPGQGLEWMGWIN |
| 113 | PNSGGTNYAQKFQGRVTMTRDTSISTAYMELSRLRSDDTAVYYCATDSFDYWGR |
| | GTLVTVSS (SEQ ID NO: 10) |
| hN1S3- | EVQLVQSGAEVKKPGASVKVSCKASGYNFTGYYMHWVRQAPGQGLEWMGWIN |
| 126 | PNSGGTNYAQKFQGRVTMTRDTSISTAYMELSRLRSDDTAVYYCATDSFDYWGQ |
| | GTLVTVSS (SEQ ID NO: 11) |
| hN1S3- | EVQLVQSGPEVKKPGTSVKVSCKASGFTFTSSAVQWVRQARGQRLEWIGWIVVG |
| 146 | SGNTNYAQKFQERVTITRDMSTSTAYMELSSLRSEDTAVYYCVADTVYWGKGTLV |
| | TVSS (SEQ ID NO: 12) |
| hN1S3- | EVQLVQSGAEVKKPGASVKVSCKASGYNFTGYYMHWVRQAPGQGLEWMGWIN |
| 174 | PNSGGTNYAQKFQGRVTMTRDTSISTAYMELSRLRSDDTAVYYCATDSFDYWGQ |
| | GTTVTVSS (SEQ ID NO: 13) |
| hN1S3- | QVQLQQSGAEVKKPGASVKVSCKASGYNFTGYYMHWVRQAPGQGLEWMGWIN |
| 056 | PNSGGTNYAQKFQGRVTMTRDTSISTAYMELSRLRSDDTAVYYCATDSFDYWGR |
| | GTLVTVSS (SEQ ID NO: 14) |
| N1wc613 | QVQLVQSGAEVKKPGASVKVSCKASGYNFTGYYMHWVRQAPGQGLEWMGWIN |
| | PNSGGTNYAQKFQGRVTMTRDTSISTAYMELSRLRSDDTAVYYCATDSFDYWGR |
| | GTLVTVSS (SEQ ID NO: 15) |
| N1wc133 | QVQLVQSGAEVKKPGASVKVSCKASGYNFTGYYMHWVRQAPGQGLEWMGWIN |
| | PNSGGTNYAQKFQGRVTMTRDTSISTAYMELSRLRSDDTAVYYCATDSFDYWGQ |
| | GTLVTVSS (SEQ ID NO: 16) |
| N1wc173 | EVQLVQSGAEVKKPGASVKVSCKASGYNFTGYYMHWVRQAPGQGLEWMGWIN |
| | PNSGGTNYAQKFQGRVTMTRDTSISTAYMELSRLRSDDTAVYYCATDSFDYWGQ |
| | GTTVTVSS (SEQ ID NO: 17) |
| N1wc155 | EVQLVQSGAEVKKPGASVKVSCKASGYNFTGYYMHWVRQAPGQGLEWMGWIN |
| | PNSGGTNYAQKFQGRVTMTRDTSISTAYMELSRLRSDDTAVYYCATDSFDYWGR |
| | GTLVTVSS (SEQ ID NO: 18) |
| N1wc168 | EVQLVQSGAEVKKPGASVKVSCKASGYNFTGYYMHWVRQAPGQGLEWMGWIN |
| | PNSGGTNYAQKFQGRVTMTRDTSISTAYMELSRLRSDDTAVYYCATDSFDYWGR |
| | GTLVTVSS (SEQ ID NO: 19) |
| N1wc159 | QLQLVETGGGLVKPGESLTLSCAASGFTFSSYSMNWVRQAPGKGLEWVSSISSS |
| | GSSIYYADSLKGRFTISRDNAKNSLYLQMNSLRAEDTAVYYCTRGTQWLAGVGDY |
| | WGKGTLVTVSS (SEQ ID NO: 20) |
| N1wc97 | EVQLVQSGAEVKKPGASVKVSCKASGYNFTGYYMHWVRQAPGQGLEWMGWIN |
| | PNSGGTNYAQKFQGRVAMTRDTSISTAYMELSRLRSDDSAVYYCATDSFDYWGR |
| | GTTVTVSS (SEQ ID NO: 21) |
| N1wc49 | EVQLVESGAEVKKPGASLNLSCKASGYSFNKYYIHWVRQAPGQGLELMGRINPGS |
| | GTTSYAQKFQGRVTLSRDTSTNTIFMELNGLTGEDTAIYYCARSNYDILAGYGPDA |
| | FDIWGRGTLVTVSS (SEQ ID NO: 22) |

Light Chain

| Clone Name | LC amino acid sequences |
|---|---|
| hN1S3- | SYVLTQPPSVSEAPRQRVTISCSGSSSNIGNNAVSWYQQLPGKAPKTLIYYDDLLS |
| 009 | SGVSDRFSGSRSGTSASLAISGLQSEDEADYYCAAWDDSLNGVVFGGGTKLTVL |
| | (SEQ ID NO: 23) |
| hN1S3- | QSVLTQPPSASGTPGQRVTISCSGSNSNIGSNYVFWYQQLPGTAPKLLIYNNNQR |
| 010 | PSGVPDRFSGSKSGTSASLAISGLRSEDEADYYCAAWDDSLSGVVFGGGTKLTVL |
| | (SEQ ID NO: 24) |
| hN1S3- | QSVLTQPPSASGTPGQRVTISCSGSSSNIGSNTVNWYQQLPGTAPKLLIYSNNQR |
| 011 | PSGVPDRFSGSKSGTSASLAISGLQSEDEADYYCAAWDDSLNGVVFGGGTKLTVL |
| | (SEQ ID NO: 25) |
| hN1S3- | QPVLTQPPSASGTPGQRVTISCSGSSSNIGSNYVYWYQKFPGTAPKLLIYTNNQR |
| 013 | PSGVPDRFSGSKSGTSASLAISGLRSEDEADYYCAAWDDSLSGVVFGGGTKVTVL |
| | (SEQ ID NO: 26) |
| hN1S3- | LPVLTQPPSASGTPGQRVTISCSGRSSNIGSNFVYWYQQLPGTAPKLLIYRNNQRP |
| 050 | SGVPDRFSGSKSGTSASLAISGLRSEDEADYYCATWDDNLSGVVFGGGTKLTVL |
| | (SEQ ID NO: 27) |
| hN1S3- | QAVLTQPSLASGTPGQRVTISCSGGSSNIGRHTVNWYQQLPGAAPKLLMHSSDQ |
| 052 | RPSGVPDRFSGSKSGTSASLAISGLQSEDEADYYCAAWDASLKNWVFGGGTKLT |
| | VL (SEQ ID NO: 28) |
| hN1S3- | QSVLTQPPSASGTPGQRVTISCSGGSSNIGSNTVTWYQQLPGKAPKLLIYISDQRP |
| 094 | SGVPDRFSGSKSGTSASLAIRGLQSEDEADYYCAAWDDSLNGAVFGTGTKVTVL |
| | (SEQ ID NO: 29) |
| hN1S3- | SYVLTQPPSASGTPGQRVTISCSGSSPNIGSNTVNWYQQLPGTAPKLLIYTNNQRP |
| 113 | SGVPDRFSGSKSATSASLAISGLQFDDEADYFCAAWDDSLLGWFGGGTKVTVL |
| | (SEQ ID NO: 30) |
| hN1S3- | SYVLTQPPSASGAPGQRVTISCSGSISNIGDNTVNWYQHLPRTAPKLVIYSDVQRP |
| 126 | SGVPERFSGSKSGTSASLVISGLQAEDEADYYCASWDDSLDGVFFGGGTKLTVL |
| | (SEQ ID NO: 31) |
| hN1S3- | QAVLTQPSSVSEAPRQRVTISCSGSSSNIGKNAVNWYQQLPGKAPKLLIYYDDLM |
| 146 | PSGVSDRFSGSKSGTSASLAISGLQSEDEADYFCAAWDDSLSGWVFGGGTKLTV |
| | L (SEQ ID NO: 32) |
| hN1S3- | QSVLTQPPSVSGAPGQRITISCTGSSSNIGAGYDVHWYQQLPGTAPKLLIYGNSYR |
| 174 | PSGVPDRFSGSKSGTSASLAITGLQAEDEADYYCQSYDSSLTGSIFGGGTKLTVL |
| | (SEQ ID NO: 33) |
| hN1S3- | QSVLTQPPSASGTPGQRVTISCSGSSSNIGSNTVNWYQQLPGTAPKLLIYSNNQR |
| 056 | PSGVPDRFSGSKSGTSASLAISGLQSEDEADYYCAAWDDSLNGLVFGGGTKVTVL |
| | (SEQ ID NO: 34) |
| N1wc613 | SYELTQPPSASGTPGQRVTISCSGSYSNIGSNYVYWYQQLPGTAPKLLIYTNNQRP |
| | SGVPDRFSGSKSGTSASLVISGLRSDDEGDYYCAAWDDSVSVLLFGGGTKVTVL |
| | (SEQ ID NO: 35) |
| N1wc133 | SYELTQPPSASGTPGQRVTISCSGSNSNIGSNTLNWYQQLPGTAPKLLIYSNNQRP |
| | SWVPDRFSGSKSGTSASLAISGLQSEDEADYYCAAWDDSLNGLIFGGGTKLTVL |
| | (SEQ ID NO: 36) |
| N1wc173 | QPVLTQPPSASWTPGQRVTISCSGSSSNIGSNTVHWYRQFPGTAPQLLIYSNNQR |
| | PSGVPDRFSGSKSGTSASLAIRGLQSEDEADYYCAAWDDSLNGVVFGGGIKLTVL |
| | (SEQ ID NO: 37) |
| N1wc155 | QSVLTQPPSVSGAPGQRVTISCTGSSSNIGAGYDVLWYRQLPGTAPKLLIYGNTH |
| | RPSGVPDRFSGSNSGTSASLAITGLQAEDEADYYCQSYDSSLSGSVFGGGTKLTV |
| | L (SEQ ID NO: 38) |
| N1wc168 | QSVLTQPPSASGTPGQRVTISCSGSSSNIGSNIVNWYQQLPGTAPKLLIYSNNQRP |
| | SGVPDRFSGSKSGTSASLAISGLQSEDEADYYCAAWDDSLNGVVFGGGTKLTVL |
| | (SEQ ID NO: 39) |
| N1wc159 | QSALTQPPSASASPGQSVTISCTGTSSDVGAYDSVSWYQQHPGKAPKLIIYDVNN |
| | RPSGVSNRFSGSESGNTASLTISGLQAEDEANYYCSSYRNTKTVVFGGGTKLTVL |
| | (SEQ ID NO: 40) |
| N1wc97 | QSVLTQPPSVSGAPGQRVTISCTGTSSNIGAGYDVQWYQQLPGTAPKVLMYGNS |
| | NRPSGVPDRFSGSKSGTSASLAITGLQAEDEADYYCQSYDSSLSGSLFGTGTKVTVL |
| | (SEQ ID NO: 41) |
| N1wc49 | QSVVTQPPSVSGAPGQTVTISCTGNSSNIGSSVDVHWYQQLPGTAPKLLIYDNKN |
| | RPSGVPDRFSGSKSGTSASLAITGLQAEDEADYYCQSYDSSLSSEVFGGGTKVTVL |
| | (SEQ ID NO: 42) |

A.2- Binding to NRR
Heavy Chain

| Clone Name | HC-sequences |
|---|---|
| N1wc629 | EVQLVQSGAEVKKPGSSVKVSCKASGGTLSSYTVSWLRQAPGQGLEWMGRIIPIL |
| | DRANYAQKFQGRVTITADKSTSTAYMELNSLRSDDTAVYYCARSIGAAGDGVWFD |
| | PWGQGTMVTVSS (SEQ ID NO: 43) |
| N1wc75 | GVQLVQSGGGLVQPGGSLRLSCAASGFTFDDYAMHWVRQAPGKGLEWVSSISW |
| | HSRTIAYADSVKGRFSISRDNAKNSLYLQMNSLRPEDTAVYYCAKASYLSTSSSLD |
| | YWGRGTLVTVSS (SEQ ID NO: 44) |
| N1wc104 | QVQLQESGPGLVKPSGTLSLTCAVSGVSLATNNWWLWVRQSPGKGLEWIGEIYH |
| | SGYTNYNPSLKSRVTISVDKSSNQLSLDLRSITAADTAVYYCARRYCDNGVCYPFD |
| | HWGQGTMVTVSS (SEQ ID NO: 45) |

Light Chain

| Clone Name | LC amino acid sequences |
|---|---|
| N1wc629 | QAVLTQPSSVSGAPGQRVTISCTGSSSNIGAGYDVHWYQQLPGTAPKLLIFDNKN |
| | RPSGVPDRFSGSNSGTSASLAITGLQAEDEAEYYCQSYDNNLSGRVFGGGTKLTVL |
| | (SEQ ID NO: 46) |
| N1wc75 | QSVLTQPGSVSGSPGQSITISCTGTSSDVGGYNYVSWYQQHPGKAPKLMIYEGSK |
| | RPSGVSNRFSGSKSGNTASLTISGLQAEDEADYYCSSYTTRSTRVFGGGTKLTVL |
| | (SEQ ID NO: 47) |
| N1wc104 | SYVLTQPPSVSEAPRQTVTISCSGNSFNIGRYPVNWYQQLPGKAPKLLIYYNNLRF |
| | SGVSDRFSGSKSGTSASLAIRDLLSEDEADYYCSTWDDTLKGWVFGGGTKLTVL |
| | (SEQ ID NO: 48) |

A.3- Additional Notch Antibodies
Heavy Chain

| Clone Name | HC-sequences |
|---|---|
| hN1S3- | EVQLVQSGAEVKKPGASVRISCKTSGFTFTSYFIHWVRQAPGQRPEWMGVINPSR |
| 067 | GNADYAPRFRGRVTMTRDKSTHTVYMDLKSLRSDDAAIYYCARDRLGGLLDYYDS |
| | SDSSKNFDAFDFWGQGTLVTVSS (SEQ ID NO: 49) |
| hN1S3- | EVQLVQSGAEVKKPGASVKVSCKASGYTFTDYYMHWVRQAPGQGLEWMGWINP |
| 116 | NSGGTYFPQNFQGRVTMTSDPSISAAYMELSNLRSDDTAVYFCARGAYDYVWGS |
| | HRYSGDAFDFWGQGTLVTVSS (SEQ ID NO: 50) |
| hN1S3- | QVQLVQSGAEVKKPGASVKVSCKASGYNFTGYYMHWVRQAPGQGLEWMGWIN |
| 193 | PNSGGTNYAQKFQGRVTMTRDTSISTAYMELSRLRSDDTAVYYCATDSFDYWGQ |
| | GTLVTVSS (SEQ ID NO: 51) |
| hN1S3- | QVQLVQSGAEVKKPGASVRISCKTSGFTFTSYFIHWVRQAPGQRPEWMGVINPS |
| 073 | RGNADYAPRFRGRVTMTRDKSTHTVYMDLKSLRSDDAAIYYCARDRLGGLLDYY |
| | DSSDSSKNFDAFDFWGQGTLVTVSS (SEQ ID NO: 52) |
| N1wc14 | EVQLVQSGGGLVQPGRSLRLSCAASGFTSDDYAMHWVRQAPGKGLD*VTAITWN |
| | SGHKDYADSVKGRFAVSRDNAKNALYLQMNSLRPEDTAVYYCAKASYLSTSSSLD |
| | YWGRGTMVTVSS (SEQ ID NO: 53) |
| N1wc23 | EVQLVQSGAEVKKPGASVKVSCKASGYNFTGYYIHWVRQAPGQGLEWMGWINP |
| | NSGGTNYAQKFQGRVIMTRDTSISTAYMELSRLRSDDTAVYYCATDSFDYWGRG |
| | TLVTVSS (SEQ ID NO: 54) |
| N1wc33 | EVQLVESGGDLVQPGGSLRLSCAASGFTFSDSWMHWVRQVPGKGLEWVSHIGID |
| | GITTNYADSVKGRFTISRDNAKNTLYLQMNNLRAEDTAVYYCARNVGWESRPWG |
| | QGTLVTVSS (SEQ ID NO: 55) |
| N1wc48 | QVQLVQSGAEVKKPGATVKISCKVSGYTFTDYYIHWVQQAPGKGLEWMGLVDPE |
| | DGETIYAEKFQGRVTIIADTSTDTAYMELSSLRSEDTAVYYCATGPFRLDSWGQGT |
| | MVTVSS (SEQ ID NO: 56) |
| N1wc60 | QVQLVQSGAEVKKPGASVKVSCKASGYNFTGYYMHWVRQAPGQGLEWMGWIN |
| | PNSGGTNYAQKFQGRVTMTRETSISTAYMELSRLRSDDTAVYYCATDSFDYWGR |
| | GTLVTISS (SEQ ID NO: 57) |
| N1wc99 | QVQLVQSGAEVKKPGASVKVSCKASGYTFTSYGISWVRQAPGQGLEWMGWISA |
| | YNGNTNYAQKLQGRVTMTTDTSTSTAYMELRSLRSDDTAVYYCARLASRAFDIWG |
| | RGTLVTVSS (SEQ ID NO: 58) |
| N1wc103 | QVQLQQSGAEVKKPGASVKVSCKASGYNFTGYYMHWVRQAPGQGLEWMGWIN |
| | PNSGGTNYAQKFQGRVTMTRDTSISTAYVELSRLRSDDTAVYYCATDSFDYWGR |
| | GTLVTVSS (SEQ ID NO: 59) |
| N1wc106 | QVQLVQSGAEVKRPGASVNLSCKASGYSFSRYYIHWVRQAPGQGLELMGRINPG |
| | GGTTTYAQKFQGRVTLSRDTSTNTIFMELNGLTSEDTAMYYCARSNYDILAGYGP |
| | DAFDFWGRGTLVTVSS (SEQ ID NO: 60) |
| N1wc110 | EVQLVQSGAEVKKPGASVKVSCKASGYNFTGYYMHWVRQAPGQGLEWMGWIN |
| | PNSGGTNYAQKFQGRVTMTRDTSISTAYMELSRLRSDDTAVYYCATDSFDYWGQ |
| | GTMVTVSS (SEQ ID NO: 61) |
| N1wc112 | EVQLVESGGGLAQPGKSLRISCAASGFTFGDYAMTWVRQAPGKGLEWVSSISGS |
| | GSGTYYTDSVKGRFAISRDNSKNTLYPQMNSLAAEDTAIYFCAKDQTDVTIRDFDY |
| | WGRGTLVTVSS (SEQ ID NO: 62) |
| N1wc137 | QVQLVQSGAEVKKPGASVKVSCKASGYTFTNYGLSWVRQAPGQGLEWMGWISG |
| | YNDNTSYAQKFQDRITMTTDTSTSTASMELRSLRSDDTAVYYCAFSYYDSSGYFN |
| | WGQGTMVTVSS (SEQ ID NO: 63) |
| N1wc140 | QVQLQQSGAEVKKPGSSVKVSCRASGGTFSNYAISWVRQAPGQGLEWMGRIIPIF |
| | GGAHYAQKLQGRVSITADESTSTAHMELSSLRSEDAAVYYCASGAYYDVMGNYP |
| | YSGMDVWGRGTLVTVSS (SEQ ID NO: 64) |
| N1wc142 | EVQLVQSGAEVKKPGASVNLSCKASGYSFSRYYIHWVRQAPGQGLELMGRINPG |
| | GGTTTYAQKFQGRVTLSRDTSTNTIFMELNGLTSEDTAMYYCARSNYDILAGYGP |
| | DAFDFWGRGTMVTVSS (SEQ ID NO: 65) |
| N1wc145 | EVQLVESGAEVKKPGASVKVSCKASGYTFTTYGISWVRQAPGQGLEWMGWISTY |
| | NGNTKYAQKLQGRVTMTTDTSTSTAYMELRSLRSDDTAVYYCARDARKAFDIWG |
| | RGTLVTVSS (SEQ ID NO: 66) |
| N1wc152 | QVQLVQSGGGLVQPGGSLRLSCGASGFTFSSHWMSWVRRPPGRGLEWVANINE |
| | GGSAEYYADSLKGRFTISRDNAKNSLFLQMDSLRAEDTAVYYCVRDQFHSNYDW |
| | GQGTMVTVSS (SEQ ID NO: 67) |
| N1wc157 | QVQLVQSGAGLKRPGTSVKISCKTSGYIFSQYPMHWVRQAPGQGLEWVAWVDT |
| | GNGTTRYSPNFQGRATVSGDTSANTGYLELRSLRFTDTAVYYCATNAFDYWGRG |
| | TLVTVSS (SEQ ID NO: 68) |
| N1wc158 | EVQLVQSGAEVKKPGASVKVSCKASGYNFTGYYMHWVRQAPGQGLEWMGWIN |
| | PNSGGTNYAQKFQGRVTMTRDTSISTAYMELSRLRSDDTAVYYCATDSFDYWGR |
| | GTLVTVSS (SEQ ID NO: 69) |
| N1wc160 | QVQLQESGAEVKKPGASVKVSCKASGYNFTGYYMHWVRQAPGQGLEWMGWIN |
| | PNSGGTNYAQKFQGRVTMTRDTSISTAYMELSRLRSDDTAVYYCATDSFDYWGR |
| | GTMVTVSS (SEQ ID NO: 70) |
| N1wc175 | QVQLVQSGAEVKKPGASVKVSCKASGYNFTGYYMHWVRQAPGQGLEWMGWIN |
| | PNSGGTNYAQKFQGRVTMTRDTSISTAYMELSRLRSDDTAVYYCATDSFDYWGR |
| | GTLVTVSS (SEQ ID NO: 71) |
| N1wc179 | EVQLVQSGAEVKKPGASVKVSCKASGYNFTGYYMHWVRQAPGQGLEWMGWIN |
| | PNSGGTNYAQKFQGRVTMTRDTSISTAYMELSRLRSDDTAVYYCATDSFDYWGQ |
| | GTMVTVSS (SEQ ID NO: 72) |
| N1wc191 | QVQLVQSGAEVKKPGASVKVSCKASGYNFTGYYMHWVRQAPGQGLEWMGWIN |
| | PNSGGTNYAQKFQGRVTMTRDTSISTAYMELSRLRSDDTAVYYCATDSFDYWGQ |
| | GTMVTVSS (SEQ ID NO: 73) |
| N1wc202 | EVQLVQSGAEVKKPGASVKVSCKASGYNFTGYYMHWVRQAPGQGLEWMGWIN |
| | PNSGGTNYAQKFQGRVTMTRDTSISTAYMELSRLRSDDTAVYYCATDSFDYWGR |
| | GTLVTVSS (SEQ ID NO: 74) |
| N1wc520 | QVQLVQSGAEVKKPGASVKVSCKASGYNFTGYYMHWVRQAPGQGLEWMGWIN |
| | PNSGGTNYAQKFQGRVTMTRDTSISTAYMELSRLRSDDTAVYYCATDSFDYWGR |
| | GTTVTVSS (SEQ ID NO: 75) |
| N1wc625 | QVQLVQSGAEVKKPGASVKVSCKASGYNFTGYYMHWVRQAPGQGLEWMGWIN |
| | PNSGGTNYAQKFQGRVTMTRDTSISTAYMELSRLRSDDTAVYYCATDSFDYWGQ |
| | GTMVTVSS (SEQ ID NO: 76) |

Light Chain

| Clone Name | LC amino acid sequences |
|---|---|
| hN1S3- | NFMLTQPHSVSESPGKTVIISCTRSSGSIASNYVQWLQQRPGSSPTTVIYDDNRRP |
| 067 | SGVPDRFSGSIDGSSNSASLTISGLKTEDEADYYCQSYDRFDHVVFGGGTKLTVL |
| | (SEQ ID NO: 77) |
| hN1S3- | QSVLTQPPSASGTPGQRVTISCSGSSSNIGSNTVNWYQRLPGAAPQLLIYNNDQR |
| 116 | PSGIPDRFSGSKSGTSGSLVISGLQSEDEADYYCASWDDSLNGRVFGGGTKLTVL |
| | (SEQ ID NO: 78) |
| hN1S3- | SYELTQPPSASGTPGQRVTISCSGSSSNIGSNTVNWYQQLPGTAPKLLIYSNNQR |
| 193 | PSGVPDRFSGSKSGTSASLAISGLQSEDEADYYCAAWDDSLNGYVFGTGTKLTVL |
| | (SEQ ID NO: 79) |
| hN1S3- | DIQMTQSPSSLSAFVGDRVTITCRASQGINNYLAWFQQKPGKAPKSLIYAASTLRS |
| 073 | GVPPRFSGSGSGTDFTLTISSLQPEDFATYYCQQYDSYPHTFGQGTRLEIK (SEQ |
| | ID NO: 80) |
| N1wc14 | SYVLTQPPSVSVAPGQTARITCGGNNIGSKSVHWYQQKPGQAPVLVIYEDSKRPS |
| | GIPERFSGSSSGTMATLTISGAQVEDEADYYCYSTDSSGNHRVFGTGTKVTVL |
| | (SEQ ID NO: 81) |
| N1wc23 | QSVLTQPPSASGTPGQRVTISCSGSYSNIGSNYVYWYQQFPGTAPKLLIYTNNQR |
| | PSGVPDRFSGSKSGSSASLAISGLRSEDEADYYCAAWDDSVGVLLFGGGTKLTVL |
| | (SEQ ID NO: 82) |
| N1wc33 | SYVLTQPPSASGAPGQRVTISCSGSDSNIGRNTVNWYQQQLPGTAPTLLIYTNNQ |
| | RPSGVPDRFSGSKSGTSASLAISGLQSGDEADYYCAAWDDSLNAYFFGPGTKLTVL |
| | (SEQ ID NO: 83) |
| N1wc48 | QSVLTQPPSVSGAPGQRVTISCTGSSSNIGAGYDVHWYQQLPGSAPKLLIYGNNN |
| | RPSGVPDRFSGSKSGTSASLAITGLQAEDEADYYCQSFDNRLSDFNVFGTGTKVTVL |
| | (SEQ ID NO: 84) |
| N1wc60 | QSVLTQPPSASGTPGQRVTISCSGSSSNIGSNYVYWYQQLPGTAPKLLIYRNNQR |
| | PSGVPDRFSGSKSGTSASLAISGLRSEDEADYYCAAWDDSLSGLVFGGGTKLTVL |
| | (SEQ ID NO: 85) |
| N1wc99 | QSVLTQPASVSGSPGQSITISCTGTSSDVGGYNYVSWYQQHPGKAPKLMIYEGSK |
| | RPSGVSNRFSGSKSGNTASLTISGLQAEDEADYYCSSYTTRSTRVFGGGTKLTVL |
| | (SEQ ID NO: 86) |
| N1wc103 | QSVLTQPPSASGTPGQRVTISCSGSSSNIGSNPVNWYQQLPGTAPKLLIYSNNQR |
| | PSGVPDRFSGSKSGTSASLAISGLHSEDEADYYCAAWDDSLNGSSVFGTGTKLTVL |
| | (SEQ ID NO: 87) |
| N1wc106 | QAVLTQPSSVSGAPGQRVTISCTGSSSNIGADNDVHWYQKFPGTAPKLLIFSNNN |
| | RPSGVPDRFSGSKSGTSASLAITGLQADDEADYYCQSYDSGLTRELFGGGTKLTVL |
| | (SEQ ID NO: 88) |
| N1wc110 | QSVVTQPPSASGSPGQRVTIACSGSSSNIGSNTVNWYQHVPGTAPKLLIYNNNQR |
| | PSGVQDRFSGSKSDTSASLAISGLQAEDEAVYYCATWDDSLIGLAFGGGTKLTVL |
| | (SEQ ID NO: 89) |
| N1wc112 | SYELTQPPSVSVAPGQTARISCGGDNLGRKSVHWYQQKPGQAPVLVIYEDSKRP |
| | SGIPERFSGSSSGTMATLTISGAQVEDEADYYCYSTDSSGNHRVFGGGTKVTVL |
| | (SEQ ID NO: 90) |
| N1wc137 | QAVLTQPSSVSGAPGQRVTVSCTGSSSNIGTGYAVHWYQQLPGTAPRLLIFGNNN |
| | RPSGVPDRFSGSKSGTSASLVITGLQAEDEADYYCQSFDTLSGSRVFGGGTKVTVL |
| | (SEQ ID NO: 91) |
| N1wc140 | SYVLTQPPSVSVSPGQTAKITCGGDKIETKSVHWYQQKPGQAPVLVIYEDTKRPS |
| | GISERLSGSSAGTVATLTITGAQVDDEADYFCYSTDATGTERVFGGGTKLTVL |
| | (SEQ ID NO: 92) |
| N1wc142 | QSVLTQPPSVSGAPGQRVTISCIGSNSNIGAGHDVHWYQQFPGTAPKLLIYDNTN |
| | RPSGVPDRFSGSKSGTSVSLAITGLQAEDEADYYCQSYDSSLGEVFGGGTKLTVL |
| | (SEQ ID NO: 93) |
| N1wc145 | HVILTQPRSVSGSPGQSITISCTGTSSDVGGYNYVSWYQQHPGKAPKLMIYEGSK |
| | RPSGVSNRFSGSKSGNTASLTISGLQAEDEADYYCSSYTTRSTRVFGGGTKLTVL |
| | (SEQ ID NO: 94) |
| N1wc152 | QAVLTQPSSVSGAPGQRVTISCTGSSSNIGAPFDVHWYQQLPGTAPKLLIYGNSN |
| | RPSGVPDRFSGSKFGTSASLAITGLQAADEADYYCQSYDSSLSGWVFGGGTKLTVL |
| | (SEQ ID NO: 95) |
| N1wc157 | SYELTQPPSVSVSPGQTARITCSGDALPDKYVHWYQQKSGQAPVLVLFDDSKRPS |
| | GIPERFSGSSSGTVATLIISGAQVEDEGDFFCYSTDSSGNERVFGGGTKLTVL |
| | (SEQ ID NO: 96) |
| N1wc158 | QSVLTQPPSASGTPGQRVTISCSGSSSNIGSNSVYWYQQLPGTAPKLLIYRNNQR |
| | PSGVPDRFSGSKSGTSASLAISGLRSEDEADYYCAAWDDSLSGLVFGGGTKLTVL |
| | (SEQ ID NO: 97) |
| N1wc160 | SYVLTQPPSASGTPGQRVTISCSGSSSNIGSNTVHWYQQLPETAPKLLIYTNNQRP |
| | SGVPDRFSGSKSGTSASLAISGLQSEDEADYYCASWDDSLKAYVFGTRTKLTVL |
| | (SEQ ID NO: 98) |
| N1wc175 | QSVLTQPPSASGTPGQRVTISCSGSRSSIGSNTVSWYQQLPGTAPKLIIYTNNQRP |
| | SGVPDRFSGSKSGTSATLAISGLQSEDEADYYCASWDDSLNDYVFGVGTKVTVL |
| | (SEQ ID NO: 99) |
| N1wc179 | SYVLTQPPSASGTPGQRVTISCSGSSSNIGSNTVNWYQQLPGTAPKLLIYNDNERP |
| | SGVPDRFSGSKSGTYASLAISGLQSEDEADYYCAAWDDSLNGLAFGGGTKLTVL |
| | (SEQ ID NO: 100) |
| N1wc191 | LPVLTQPPSASGTPGQRVTISCSGSSSNIGSNIVNWYQQLPGTAPKLLIYTSNQRP |
| | SGVPDRFSGSKSGTSASLAISGLQSEDEADYYCAAWDDSLNAVVFGGGTKVTVL |
| | (SEQ ID NO: 101) |
| N1wc202 | SYELTQPPSVSGTPGQRVTISCSGSSSNIESNAVHWYQHLPGRAPKLLIFSHNQRP |
| | SGVPARFSGSKSGTSASLAISGLQSEDEADYYCAAWDDSLSGYVFASGTKLTVL |
| | (SEQ ID NO: 102) |
| N1wc520 | SYVLTQPPSVSGTPGQRVTISCSGSSSNIESNAVHWYQHLPGRAPKLLIFSHNQRP |
| | SGVPARFSGSKSGTSASLAISGLQSEDEADYYCAAWDDSLSGYVFASGTKVTVL |
| | (SEQ ID NO: 103) |
| N1wc625 | QSVLTQPPSASGTPGQRVTISCSGGRSNIGTNYVYWYQKLPGTAPKSLIYTTNQR |
| | PSGVPDRFSGSKAGTSASLAISGLRSEDEGDYYCASWDESLNGVVFGGGTKVTVL |
| | (SEQ ID NO: 104) |

B. DNA sequence
B.1- Binding to LBD (N1-EGF 1-13)

Heavy Chain
>hN1S3-009
GAAGTGCAGCTGGTGCAGTCTGGGGCTGAGGTGAAGAAGCCTGGGGCCTCAGTGAAGGTCTCTTG
CAAGGCTTCTGGATACAACTTCACCGGCTACTATATGCACTGGGTGCGACAGGCCCCTGGACAAGG
GCTTGAGTGGATGGGATGGATCAACCCTAACAGTGGTGGCACAAACTATGCACAGAAGTTTCAGGG
CAGGGTCACCATGACCAGGGACACGTCCATCAGCACAGCCTACATGGAGTTGAGCAGGCTGAGATC
TGACGACACGGCCGTGTATTACTGTGCGACAGACTCCTTTGACTACTGGGGCCAGGGGACAATGGT
CACCGTCTCGAGT (SEQ ID NO: 105)
>hN1S3-010
GAGGTGCAGCTGGTGCAGTCTGGGGCTGAGGTGAAGAAGCCTGGGGCCTCAGTGAAGGTCTCCTG
CAAGGCTTCTGGATACAACTTCACCGGCTACTATATGCACTGGGTGCGACAGGCCCCTGGACAAGG
GCTTGAGTGGATGGGATGGATCAACCCTAACAGTGGTGGCACAAACTATGCACAGAAGTTTCAGGG
CAGGGTCATCATGACCAGGGACACGTCCATCAGCACAGCCTACATGGAACTGAGCAGGCTGACATC
TGACGACACGGCCGTGTATTACTGTGCGACAGACTCCTTTGACTACTGGGGCAGAGGGACAATGGT
CACCGTCTCGAGT (SEQ ID NO: 106)
> hN1S3-011
CAGGTGCAGCTGGTGCAGTCTGGGCCTGAGGTGAAGAAGCCTGGGGCCTCAGTGAAGGTCTCTTG
CAAGGCTTCTGGATACAACTTCACCGGCTACTATATGCACTGGGTGCGACAGGCCCCTGGACAAGG
GCTTGAGTGGATGGGATGGATCAACCCTAACAGTGGTGGCACAAACTATGCACAGAAGTTTCAGGG
CAGGGTCACCATGACCAGGGACACGTCCATCAGCACAGCCTACATGGAGCTGAGCAGGCTGAGATC
TGACGACACGGCCGTGTATTACTGTGCGACAGACTCCTTTGACTACTGGGGCCGGGGGACAATGGT
CACCGTCTCGAGT (SEQ ID NO: 107)
> hN1S3-050
CAGGTGCAGCTGGTGCAGTCTGGGGCTGAGGTGAAGAAGCCTGGGGCCTCAGTGAAGGTCTCTTG
CAAGGCTTCTGGATACAACTTCACCGGCTACTATATGCACTGGGTGCGACAGGCCCCTGGACAAGG
GCTTGAGTGGATGGGATGGATCAACCCTAACAGTGGTGGCACAAACTATGCACAGAAGTTTCAGGG
CAGGGTCACCATGACCAGGGACACGTCCATCAGCACAGCCTACATGGAGCTGAGCAGGCTGAGATC
TGACGACACGGCCGTGTATTACTGTGCGACAGACTCCTTTGACTACTGGGGCCGGGGGACAATGGT
CACCGTCTCGAGT (SEQ ID NO: 108)
> hN1S3-052
CAGGTCCAGCTGGTACAGTCTGGAGCTGAGGTGAAGAAGCCTGGGGCCTCAGTGAGGATTTCCTGC
AAGACATCTGGATTCACCTTTACCAGCTACTTTATCCACTGGGTGCGGCAGGCCCCAGGACAAAGG
CCAGAGTGGATGGGCGTTATCAACCCAAGCCGTGGCAACGCAGACTACGCACCGAGGTTCCGTGG
CAGAGTCACCATGACCCGGGACAAGTCCACGCACACTGTTTACATGGATCTGAAGAGCCTCAGATCT
GACGACGCGGCCATATATTACTGTGCCAGAGATCGGCTTGGTGGCCTTCTTGATTACTACGACAGTA
GTGATTCTTCGAAGAATTTTGATGCTTTTGATTTCTGGGGCCAAGGCACCCTGGTCACCGTCTCGAGT
(SEQ ID NO: 109)
> hN1S3-094
GAGGTGCAGCTGGTGCAGTCTGGGGCTGAGGTGAAGAAGCCTGGGGCCTCAGTGAAGGTCTCCTG
CAAGGCTTCTGGATACAACTTCACCGGCTACTATATGCACTGGGTGCGACAGGCCCCTGGACAAGG
GCTTGAGTGGATGGGATGGATCAACCCTAACAGTGGTGGCACAAACTATGCACAGAAGTTTCAGGG
CAGGGTCACCATGACCAGGGACACGTCCATCAGCACAGCCTACATGGAGCTGAGCAGGCTGAGATC
TGACGACACGGCCGTGTATTACTGTGCGACAGACTCCTTTGACTACTGGGGCCGGGGGACAATGGT
CACCGTCTCGAGT (SEQ ID NO: 110)
> hN1S3-113
GAGGTGCAGCTGGTGCAGTCTGGGGCTGAGGTGAAGAAGCCTGGGGCCTCAGTGAAGGTCTCTTG
CAAGGCTTCTGGATACAACTTCACCGGCTACTATATGCACTGGGTGCGACAGGCCCCTGGACAAGG
GCTTGAGTGGATGGGATGGATCAACCCTAACAGTGGTGGCACAAACTATGCACAGAAGTTTCAGGG
CAGGGTCACCATGACCAGGGACACGTCCATCAGCACAGCCTACATGGAGCTGAGCAGGCTGAGATC
TGACGACACGGCCGTGTATTACTGTGCGACAGACTCCTTTGACTACTGGGGCCGGGGCACCCTGGT
CACCGTCTCGAGT (SEQ ID NO: 111)
>hN1S3-126
GAGGTGCAGCTGGTGCAGTCTGGGGCTGAGGTGAAGAAGCCTGGGGCCTCAGTGAAGGTCTCTTG
CAAGGCTTCTGGATACAACTTCACCGGCTACTATATGCACTGGGTGCGACAGGCCCCTGGACAAGG
GCTTGAGTGGATGGGATGGATCAACCCTAACAGTGGTGGCACAAACTATGCACAGAAGTTTCAGGG
CAGGGTCACCATGACCAGGGACACGTCCATCAGCACAGCCTACATGGAGCTGAGCAGGCTGAGATC
TGACGACACGGCCGTGTATTACTGTGCGACAGACTCCTTTGACTACTGGGGCCAGGGCACCCTGGT
CACCGTCTCGAGT (SEQ ID NO: 112)
> hN1S3-146
GAGGTGCAGCTGGTGCAGTCTGGGCCTGAGGTGAAGAAGCCTGGGACCTCAGTGAAGGTCTCCTG
CAAGGCTTCTGGATTCACCTTTACTAGCTCTGCTGTGCAGTGGGTGCGACAGGCTCGTGGACAACG
CCTTGAGTGGATAGGATGGATCGTCGTTGGCAGTGGTAACACAAACTACGCACAGAAGTTCCAGGA
AAGAGTCACCATTACCAGGGACATGTCCACAAGCACAGCCTACATGGAGCTGAGCAGCCTGAGATC
CGAGGACACGGCCGTGTATTATTGTGTGGCAGATACGGTCTACTGGGGCAAGGGAACCCTGGTCAC
CGTCTCGAGT (SEQ ID NO: 113)
> hN1S3-174
GAAGTGCAGCTGGTGCAGTCTGGGGCTGAGGTGAAGAAGCCTGGGGCCTCAGTGAAGGTCTCCTG
CAAGGCTTCTGGATACAACTTCACCGGCTACTATATGCACTGGGTGCGACAGGCCCCTGGACAAGG
ACTTGAGTGGATGGGATGGATCAACCCTAACAGTGGTGGCACAAACTATGCACAGAAGTTTCAGGG
CAGGGTCACCATGACCAGGGACACGTCCATCAGCACAGCCTACATGGAGCTGAGCAGGCTGAGATC
TGACGACACGGCCGTGTATTACTGTGCGACAGACTCCTTTGACTACTGGGGGCAAGGGACCACGGT
CACCGTCTCGAGT (SEQ ID NO: 114)
> hN1S3-056
CAGGTACAGCTGCAGCAGTCAGGGGCTGAGGTGAAGAAGCCTGGGGCCTCAGTGAAGGTCTCCTG
CAAGGCTTCTGGATACAACTTCACCGGCTACTATATGCACTGGGTGCGACAGGCCCCTGGACAAGG
ACTTGAGTGGATGGGATGGATCAACCCTAACAGTGGTGGCACAAACTATGCACAGAAGTTTCAGGG
CAGGGTCACCATGACCAGGGACACGTCCATCAGCACAGCCTACATGGAGCTGAGCAGGCTGAGATC
TGACGACACGGCCGTGTATTACTGTGCGACAGACTCCTTTGACTACTGGGGCCGGGGAACCCTGGT
CACCGTCTCGAGT (SEQ ID NO: 115)
> hN1S3-013
GAGGTGCAGCTGGTGCAGTCTGGGGCTGAGGTGAAGAAGCCTGGGGCCTCAGTGAAGGTCTCCTG
CAAGGCTTCTGGATACAACTTCACCGGCTACTATATGCACTGGGTGCGACAGGCCCCTGGACAAGG
GCTTGAGTGGATGGGATGGATCAACCCTAACAGTGGTGGCACAAACTATGCACAGAAGTTTCAGGG
CAGGGTCACCATGACCAGGGACACGTCCATCAGCACAGCCTACATGGAGCTGAGCAGGCTGAGATC
TGACGACACGGCCGTGTATTACTGTGCGACAGACTCCTTTGACTACTGGGGCCGAGGAACCCTGGT
CACCGTCTCGAGT (SEQ ID NO: 116)
>N1wc613
CAGGTCCAGCTGGTGCAGTCTGGGGCTGAGGTGAAGAAGCCTGGGGCCTCAGTGAAGGTCTCTTG
CAAGGCTTCTGGATACAACTTCACCGGCTACTATATGCACTGGGTGCGACAGGCCCCTGGACAAGG
GCTTGAGTGGATGGGATGGATCAACCCTAACAGTGGTGGCACAAACTATGCACAGAAGTTTCAGGG
CAGGGTCACCATGACCAGGGACACGTCCATCAGCACAGCCTACATGGAGCTGAGCAGGCTGAGATC
TGACGACACGGCCGTGTATTACTGTGCGACAGACTCCTTTGACTACTGGGGCCGGGGCACCCTGGT
CACCGTCTCGAGT (SEQ ID NO: 117)
>N1wc133
CAGGTGCAGCTGGTGCAATCTGGGGCTGAGGTGAAGAAGCCTGGGGCCTCAGTGAAGGTCTCTTG
CAAGGCTTCTGGATACAACTTCACCGGCTACTATATGCACTGGGTGCGACAGGCCCCTGGACAAGG
GCTTGAGTGGATGGGATGGATCAACCCTAACAGTGGTGGCACAAACTATGCACAGAAGTTTCAGGG
CAGGGTCACCATGACCAGGGACACGTCCATCAGCACAGCCTACATGGAGCTGAGCAGGCTGAGATC
TGACGACACGGCCGTGTATTACTGTGCGACAGACTCCTTTGACTACTGGGGCCAGGGCACCCTGGT
CACCGTCTCGAGT (SEQ ID NO: 118)
>N1wc173
GAGGTGCAGCTGGTGCAGTCTGGGGCTGAGGTGAAGAAGCCTGGGGCCTCAGTGAAGGTCTCCTG
CAAGGCTTCTGGATACAACTTCACCGGCTACTATATGCACTGGGTGCGACAGGCCCCTGGACAAGG
GCTTGAGTGGATGGGATGGATCAACCCTAACAGTGGTGGCACAAACTATGCACAGAAGTTTCAGGG
CAGGGTCACCATGACCAGGGACACGTCCATCAGCACAGCCTACATGGAGCTGAGCAGGCTGAGATC
TGACGACACGGCCGTGTATTACTGTGCGACAGACTCCTTTGACTACTGGGGGCAGGGGACCACGGT
CACCGTCTCGAGT (SEQ ID NO: 119)
>N1wc155
GAGGTGCAGCTGGTGCAGTCTGGGGCTGAGGTGAAGAAGCCTGGGGCCTCAGTGAAGGTCTCTTG
CAAGGCTTCTGGATACAACTTCACCGGCTACTATATGCACTGGGTGCGACAGGCCCCTGGACAAGG
GCTTGAGTGGATGGGATGGATCAACCCTAACAGTGGTGGCACAAACTATGCACAGAAGTTTCAGGG
CAGGGTCACCATGACCAGGGACACGTCCATCAGCACAGCCTACATGGAGCTGAGCAGGCTGAGATC
TGACGACACGGCCGTGTATTACTGTGCGACAGACTCCTTTGACTACTGGGGCCGGGGAACCCTGGT
CACCGTCTCGAGT (SEQ ID NO: 120)
>N1wc168
GAGGTCCAGCTGGTGCAGTCTGGGGCTGAGGTGAAGAAGCCTGGGGCCTCAGTGAAGGTCTCTTG
CAAGGCTTCTGGATACAACTTCACCGGCTACTATATGCACTGGGTGCGACAGGCCCCTGGACAAGG
GCTTGAGTGGATGGGATGGATCAACCCTAACAGTGGTGGCACAAACTATGCACAGAAGTTTCAGGG
CAGGGTCACCATGACCAGGGACACGTCCATCAGCACAGCCTACATGGAGCTGAGCAGGCTGAGATC
TGACGACACGGCCGTGTATTACTGTGCGACAGACTCCTTTGACTACTGGGGCCGGGGCACCCTGGT
CACCGTCTCGAGT (SEQ ID NO: 121)
>N1wc159
CAGCTGCAGCTGGTGGAGACCGGGGGAGGCCTGGTCAAGCCTGGGGAGTCCCTGACTCTCTCCTG
TGCAGCCTCTGGATTCACCTTCAGTAGTTATTCCATGAACTGGGTCCGCCAGGCTCCAGGGAAGGG
GCTGGAGTGGGTCTCATCCATTAGTAGTAGTGGTAGTTCCATATACTACGCAGACTCATTGAAGGGC
CGATTCACCATCTCCAGAGACAACGCCAAGAACTCACTGTATCTGCAAATGAACAGCCTGAGAGCCG
AGGACACGGCTGTCTATTACTGTACGAGAGGGACGCAGTGGCTGGCTGGGGTAGGAGACTATTGG
GGCAAGGGAACCCTGGTCACCGTCTCGAGT (SEQ ID NO: 122)
>N1wc97
GAGGTCCAGCTGGTGCAGTCTGGGGCTGAGGTGAAGAAGCCTGGGGCCTCAGTGAAGGTCTCCTG
CAAGGCTTCTGGATACAACTTCACCGGCTACTATATGCACTGGGTGCGACAGGCCCCTGGACAAGG
GCTTGAGTGGATGGGATGGATCAACCCTAACAGTGGTGGCACAAACTATGCACAGAAGTTTCAGGG
CAGGGTCGCCATGACCAGGGACACGTCCATCAGCACAGCCTACATGGAGCTGAGCAGGCTGAGAT
CTGACGACTCGGCCGTGTATTACTGTGCGACAGACTCCTTTGACTACTGGGGGCGAGGGACCACGG
TCACCGTCTCGAGT (SEQ ID NO: 123)
>N1wc49
GAGGTGCAGCTGGTGGAGTCTGGGGCTGAGGTGAAGAAGCCTGGGGCCTCACTTAACCTTTCCTG
CAAGGCATCTGGATACTCCTTCAACAAATACTACATCCACTGGGTGCGACAGGCCCCTGGACAAGG
ACTTGAGTTGATGGGACGGATCAACCCTGGAAGTGGTACCACAAGCTACGCACAGAAATTCCAGGG
CAGAGTCACCCTGTCCAGGGACACGTCGACGAACACCATCTTCATGGAACTGAACGGCCTCACAGG
TGAAGACACGGCCATATATTATTGTGCGAGGTCGAACTACGATATATTGGCTGGTTATGGGCCTGAC
GCTTTTGATATCTGGGGCCGAGGCACCCTGGTCACCGTCTCGAGT (SEQ ID NO: 124)
Light Chain
> hN1S3-009
TCCTATGTGCTGACTCAGCCACCCTCGGTGTCTGAAGCCCCCAGGCAGAGGGTCACCATCTCCTGT
TCTGGAAGCAGCTCCAACATCGGAAATAATGCTGTAAGCTGGTACCAGCAGCTCCCAGGAAAGGCT
CCCAAAACCCTCATCTATTATGATGATCTGCTGTCCTCAGGGGTCTCTGACCGATTCTCTGGCTCCA
GGTCTGGCACCTCAGCCTCCCTGGCCATCAGTGGGCTCCAGTCCGAGGATGAGGCTGATTATTACT
GTGCAGCATGGGATGACAGCCTGAATGGTGTGGTATTCGGCGGAGGGACCAAGCTGACCGTCCTA
(SEQ ID NO: 125)
> hN1S3-010
CAGTCTGTGCTGACGCAGCCGCCCTCAGCGTCTGGGACCCCCGGGCAGAGGGTCACCATCTCTTG
TTCTGGAAGCAACTCCAACATCGGCAGTAATTATGTATTCTGGTACCAGCAGCTCCCGGGAACGGCC
CCCAAACTCCTCATCTATAACAATAATCAGCGGCCCTCAGGGGTCCCTGACCGATTCTCTGGCTCCA
AGTCTGGCACCTCAGCCTCCCTGGCCATCAGTGGGCTCCGGTCCGAGGATGAGGCTGATTATTACT
GTGCAGCATGGGATGACAGCCTGAGTGGTGTGGTATTCGGCGGAGGGACCAAGCTGACCGTCCTA
(SEQ ID NO: 126)
> hN1S3-011
CAGTCTGTGCTGACTCAGCCACCCTCAGCGTCTGGGACCCCCGGGCAGAGGGTCACCATCTCTTGT
TCTGGAAGCAGCTCCAACATCGGAAGTAATACTGTAAACTGGTACCAGCAGCTCCCAGGAACGGCC
CCCAAACTCCTCATCTATAGTAATAATCAGCGGCCCTCAGGGGTCCCTGACCGATTCTCTGGCTCCA
AGTCTGGCACCTCAGCCTCCCTGGCCATCAGTGGGCTCCAGTCTGAGGATGAGGCTGATTATTACT
GTGCAGCATGGGATGACAGCCTGAATGGTGTGGTATTCGGCGGAGGGACCAAGCTGACCGTCCTA
(SEQ ID NO: 127)
> hN1S3-050
CTGCCTGTGCTGACTCAGCCACCCTCAGCGTCTGGGACCCCCGGGCAGAGGGTCACCATCTCTTGT
TCTGGAAGGAGCTCCAACATCGGAAGTAATTTTGTATATTGGTACCAGCAGCTCCCAGGAACGGCCC
CCAAACTCCTCATCTACAGGAATAATCAGCGGCCCTCAGGGGTCCCTGACCGATTCTCCGGCTCCA
AGTCTGGCACCTCAGCCTCCCTGGCCATCAGTGGGCTCCGGTCCGAGGATGAGGCTGATTATTATT
GTGCAACATGGGATGACAACCTGAGTGGTGTGGTATTCGGCGGAGGGACCAAGCTGACCGTCCTA
(SEQ ID NO: 128)
> hN1S3-052
CAGGCTGTGCTGACTCAGCCGTCCTTAGCGTCTGGGACCCCCGGGCAGAGGGTCACCATCTCTTGT
TCTGGAGGCAGTTCCAACATCGGAAGACATACTGTGAACTGGTACCAGCAACTCCCAGGAGCGGCC
CCCAAACTCCTCATGCATAGTAGTGATCAGCGGCCCTCAGGGGTCCCTGACCGATTCTCTGGCTCC
AAGTCTGGGACCTCAGCCTCCCTGGCCATCAGTGGGCTCCAGTCTGAGGATGAGGCTGATTATTAC
TGTGCAGCATGGGATGCCAGTCTCAAGAATTGGGTGTTCGGCGGAGGGACCAAGCTGACCGTCCTA
(SEQ ID NO: 129)
> hN1S3-094
CAGTCTGTGCTGACGCAGCCGCCCTCAGCGTCTGGGACCCCCGGGCAGAGGGTCACCATCTCTTG
TTCTGGAGGCAGTTCCAACATCGGAAGTAATACTGTAACCTGGTACCAACAACTCCCAGGAAAGGCC
CCCAAACTCCTCATTTATATCAGTGATCAGCGGCCCTCTGGGGTCCCTGACCGATTCTCTGGCTCCA
AGTCTGGCACCTCAGCCTCCCTGGCCATCAGAGGGCTCCAGTCTGAGGATGAGGCTGATTATTACT
GTGCAGCATGGGATGACAGCCTCAATGGTGCCGTCTTCGGAACTGGGACCAAGGTCACCGTCCTA
(SEQ ID NO: 130)
> hN1S3-113
TCCTATGTGCTGACTCAGCCACCCTCAGCGTCTGGGACCCCCGGGCAGAGGGTCACCATCTCTTGT
TCTGGGAGCAGTCCCAACATCGGAAGTAATACTGTCAACTGGTACCAGCAACTCCCAGGAACGGCC
CCCAAACTTCTCATCTATACTAATAATCAGCGGCCCTCAGGGGTCCCTGACCGATTCTCTGGCTCCA
AGTCTGCTACCTCAGCCTCCCTGGCCATCAGTGGGCTCCAGTTTGACGATGAGGCTGATTATTTCTG
TGCAGCGTGGGACGACAGCCTTCTTGGTGTGGTCTTCGGCGGAGGGACCAAGGTCACCGTCCTA
(SEQ ID NO: 131)
> hN1S3-126
TCCTATGTGCTGACTCAGCCACCCTCAGCGTCTGGGGCCCCCGGTCAGAGGGTCACCATCTCTTGT
TCTGGTAGCATCTCCAACATCGGAGATAATACTGTAAACTGGTACCAACACCTCCCAAGAACGGCCC
CCAAACTCGTCATCTATAGTGATGTTCAGCGGCCCTCCGGGGTCCCTGAGCGATTCTCTGGCTCCAA
GTCTGGCACCTCAGCCTCCCTGGTCATCAGTGGACTCCAGGCTGAAGATGAGGCTGATTATTACTGT
GCATCATGGGACGACAGCCTGGATGGTGTGTTTTTCGGCGGAGGGACCAAGCTGACCGTCCTA
(SEQ ID NO: 132)
> hN1S3-146
CAGGCTGTGCTGACTCAGCCGTCCTCGGTGTCTGAGGCCCCCAGGCAGAGGGTCACCATCTCCTGT
TCTGGAAGCAGCTCCAACATCGGAAAGAATGCTGTAAACTGGTACCAGCAGCTCCCAGGGAAGGCT
CCCAAACTCCTCATCTATTATGATGATCTGATGCCCTCAGGGGTCTCTGACCGATTCTCTGGCTCCA
AGTCTGGCACCTCAGCCTCCCTGGCCATCAGTGGGCTCCAGTCTGAGGATGAGGCTGACTATTTCT
GTGCAGCATGGGATGACAGCCTGAGTGGTTGGGTGTTCGGCGGAGGGACCAAGCTGACCGTCCTA
(SEQ ID NO: 133)
> hN1S3-174
CAGTCTGTGTTGACGCAGCCGCCCTCAGTGTCTGGGGCCCCAGGGCAGAGGATCACCATCTCCTG
CACTGGGAGCAGCTCCAACATCGGGGCAGGTTATGATGTACACTGGTACCAGCAGCTTCCAGGAAC
AGCCCCCAAACTCCTCATCTATGGTAACAGCTATCGGCCCTCAGGGGTCCCTGACCGATTCTCTGG
CTCCAAGTCTGGCACCTCAGCCTCCCTGGCCATCACTGGGCTCCAGGCTGAGGATGAGGCTGATTA
TTACTGCCAGTCCTATGACAGCAGCCTGACTGGTTCGATATTCGGCGGAGGGACCAAGCTGACCGT
CCTA (SEQ ID NO: 134)
> hN1S3-056
CAGTCTGTGCTGACTCAGCCACCCTCAGCGTCTGGGACCCCCGGGCAGAGGGTCACCATCTCTTGT
TCTGGAAGCAGCTCCAACATCGGAAGTAATACTGTAAACTGGTACCAGCAGCTCCCAGGAACGGCC
CCCAAACTCCTCATCTATAGTAATAATCAGCGGCCCTCAGGGGTCCCTGACCGATTCTCTGGCTCCA
AGTCTGGCACCTCAGCCTCCCTGGCCATCAGTGGGCTCCAGTCTGAGGATGAGGCTGATTATTACT
GTGCAGCATGGGATGACAGCCTGAATGGGTTGGTATTCGGCGGAGGGACCAAGGTCACCGTCCTA
(SEQ ID NO: 135)
> hN1S3-013
CAGCCTGTGCTGACTCAGCCACCCTCAGCGTCTGGGACCCCCGGGCAGAGGGTCACCATCTCTTGT
TCTGGAAGCAGCTCCAACATCGGAAGTAATTATGTATATTGGTACCAGAAGTTCCCAGGAACGGCCC
CCAAACTCCTCATCTATACGAATAATCAGCGGCCCTCAGGGGTCCCTGACCGATTTTCTGGCTCCAA
GTCTGGCACCTCAGCCTCCCTGGCCATCAGTGGGCTCCGGTCCGAGGATGAGGCTGATTATTACTG
TGCAGCATGGGATGACAGCCTGAGTGGTGTGGTATTCGGCGGAGGGACCAAGGTCACCGTCCTA
(SEQ ID NO: 136)
>N1wc613
TCCTATGAGCTGACTCAGCCACCCTCAGCGTCTGGGACCCCCGGGCAGAGGGTCACCATCTCTTGT
TCTGGAAGCTACTCCAACATCGGAAGTAATTATGTATACTGGTACCAGCAGCTCCCAGGAACGGCCC
CCAAACTCCTCATCTATACGAATAATCAGCGGCCCTCAGGGGTCCCTGACCGATTCTCTGGCTCCAA
GTCTGGCACCTCAGCCTCCCTTGTCATCAGTGGGCTCCGGTCCGACGATGAAGGTGATTATTACTGT
GCAGCATGGGATGACAGTGTGAGTGTCCTGTTATTCGGCGGGGGGACCAAGGTCACCGTCCTA
(SEQ ID NO: 137)
>N1wc133
TCCTATGAGCTGACTCAGCCACCCTCAGCGTCTGGGACCCCCGGGCAGAGGGTCACCATCTCTTGT
TCTGGAAGCAACTCCAACATCGGAAGTAATACTCTAAACTGGTACCAACAACTCCCAGGAACGGCCC
CCAAACTCCTCATCTATAGTAATAATCAGCGGCCCTCATGGGTCCCTGACCGATTCTCTGGCTCCAA
GTCTGGCACCTCAGCCTCCCTGGCCATCAGTGGTCTCCAGTCTGAGGATGAGGCTGATTATTACTGT
GCAGCATGGGATGACAGCCTGAATGGCCTGATATTCGGCGGAGGGACCAAGCTGACCGTCCTA
(SEQ ID NO: 138)
>N1wc173
CAGCCTGTGCTGACTCAGCCCCCCTCAGCGTCTTGGACCCCCGGGCAGAGGGTCACCATCTCTTGT
TCTGGAAGCAGTTCCAACATCGGAAGTAATACAGTGCACTGGTACCGGCAGTTCCCAGGAACGGCC
CCCCAACTCCTCATCTATAGTAATAACCAGCGGCCCTCAGGGGTCCCTGACCGATTCTCTGGCTCCA
AGTCTGGCACCTCAGCCTCCCTGGCCATCAGAGGGCTCCAGTCTGAGGATGAGGCTGATTATTATT
GTGCAGCATGGGATGACAGCCTGAATGGTGTGGTTTTCGGCGGAGGGATCAAGCTGACCGTCCTA
(SEQ ID NO: 139)
>N1wc155
CAGTCTGTGTTGACGCAGCCGCCCTCAGTGTCTGGGGCCCCAGGGCAGAGGGTCACCATCTCCTG
CACTGGGAGCAGCTCCAACATCGGGGCAGGTTATGATGTACTCTGGTACCGGCAGCTTCCAGGAAC
AGCCCCCAAACTCCTCATCTATGGTAACACCCATCGGCCCTCAGGGGTCCCTGACCGATTCTCTGG
CTCCAACTCTGGCACCTCAGCCTCCCTGGCCATCACTGGGCTCCAGGCTGAGGATGAGGCTGATTA
TTACTGCCAGTCCTATGACAGCAGCCTGAGTGGTTCGGTGTTCGGCGGAGGGACCAAGCTGACCGT
CCTA (SEQ ID NO: 140)
>N1wc168
CAGTCTGTGTTGACGCAGCCGCCCTCAGCGTCTGGGACCCCCGGGCAGAGGGTCACCATCTCTTGT
TCTGGAAGCAGCTCCAACATCGGAAGTAATATTGTAAACTGGTACCAGCAGCTCCCAGGAACGGCC
CCCAAACTCCTCATCTATAGTAATAATCAGCGGCCCTCAGGGGTCCCTGACCGATTCTCTGGCTCCA
AGTCTGGCACCTCAGCCTCCCTGGCCATCAGTGGGCTCCAGTCTGAGGATGAGGCTGATTATTACT
GTGCAGCATGGGATGACAGCCTGAATGGTGTGGTATTCGGCGGAGGGACCAAGCTGACCGTCCTA
(SEQ ID NO: 141)
>N1wc159
CAATCTGCCCTGACTCAGCCTCCCTCCGCGTCCGCGTCTCCTGGCCAGTCAGTCACCATCTCCTGC
ACTGGAACCAGCAGTGACGTTGGTGCTTATGACTCTGTCTCCTGGTACCAACAGCACCCCGGCAAA
GCCCCCAAACTCATAATTTATGACGTCAATAACCGGCCCTCAGGGGTTTCGAATCGCTTCTCTGGCT
CCGAGTCTGGCAACACGGCCTCCCTGACCATCTCTGGGCTCCAGGCTGAGGACGAGGCTAATTATT
ACTGCAGCTCATATAGAAACACCAAGACTGTGGTATTCGGCGGGGGGACCAAGCTGACCGTCCTA
(SEQ ID NO: 142)
>N1wc97
CAGTCTGTGCTGACTCAGCCACCCTCGGTGTCTGGGGCCCCAGGCCAGAGGGTCACCATCTCCTG
CACTGGGACCAGCTCCAACATCGGGGCAGGTTATGATGTACAGTGGTACCAGCAGCTTCCAGGAAC
AGCCCCCAAAGTCCTCATGTATGGTAACAGCAATCGGCCCTCAGGGGTCCCTGACCGATTCTCAGG
CTCCAAGTCTGGCACCTCAGCCTCCCTGGCCATCACTGGGCTCCAGGCTGAGGATGAGGCTGATTA
TTATTGCCAGTCCTATGACAGCAGCCTGAGTGGTTCCCTCTTCGGAACCGGGACCAAGGTCACCGT
CCTA (SEQ ID NO: 143)
>N1wc49
CAGTCTGTCGTGACGCAGCCGCCCTCGGTGTCTGGGGCTCCGGGGCAGACAGTCACCATCTCCTG
CACTGGGAATAGCTCCAACATCGGGTCAAGTGTTGATGTACACTGGTACCAGCAGCTTCCAGGGAC
AGCCCCCAAACTCCTCATCTATGATAACAAAAATCGGCCCTCGGGGGTCCCTGACCGATTCTCTGGC
TCCAAGTCTGGCACCTCAGCCTCCCTGGCCATCACTGGGCTCCAGGCTGAGGATGAGGCTGATTAT
TACTGCCAGTCCTATGACAGCAGCCTGAGTTCTGAGGTGTTCGGCGGAGGGACCAAGGTCACCGTC
CTA (SEQ ID NO: 144)

B.2- Binding to NRR

Heavy Chain
>N1wc629
GAGGTCCAGCTGGTACAGTCTGGGGCTGAGGTGAAGAAGCCTGGGTCCTCGGTGAAGGTCTCCTG
CAAGGCTTCTGGAGGCACCCTCAGCAGCTACACTGTCAGCTGGTTGCGACAGGCCCCTGGACAAG
GTCTTGAGTGGATGGGACGGATTATCCCTATCCTTGATAGAGCAAACTATGCACAGAAGTTCCAGGG
CAGAGTCACGATTACCGCGGACAAATCCACGAGCACAGCCTACATGGAGCTCAACAGCCTGAGATC
GGACGACACGGCCGTATATTACTGTGCGAGAAGTATAGGAGCAGCTGGCGATGGTGTTTGGTTCGA
CCCCTGGGGCCAGGGGACAATGGTCACCGTCTCGAGT (SEQ ID NO: 145)
>N1wc75
GGGGTGCAGCTGGTGCAGTCTGGGGGAGGCTTGGTACAGCCTGGGGGGTCCCTGAGACTCTCCTG
TGCAGCCTCTGGATTCACCTTTGATGATTATGCCATGCACTGGGTCCGGCAAGCTCCAGGGAAGGG
CCTGGAGTGGGTCTCAAGTATTAGTTGGCATAGTCGTACCATAGCCTATGCGGACTCTGTGAAGGG
CCGATTCTCCATCTCCAGAGACAACGCCAAGAACTCCCTCTATCTGCAAATGAACAGTCTGAGACCT
GAGGACACGGCCGTATATTACTGTGCGAAAGCCTCGTACCTCAGCACCTCGTCCTCCCTTGACTATT
GGGGCCGAGGAACCCTGGTCACCGTCTCGAGT (SEQ ID NO: 146)
>N1wc104
CAGGTGCAGCTGCAGGAGTCCGGCCCAGGACTGGTGAAGCCTTCGGGGACCCTGTCCCTCACCTG
CGCTGTCTCTGGTGTCTCCCTCGCCACTAATAACTGGTGGCTTTGGGTCCGCCAGTCCCCAGGGAA
GGGACTGGAGTGGATTGGAGAAATTTATCATAGTGGATACACCAACTACAACCCGTCCCTCAAGAGT
CGAGTCACCATATCCGTAGACAAGTCCAGCAACCAGCTCTCCCTGGACCTGAGGTCTATCACCGCC
GCGGACACGGCCGTTTATTATTGTGCGAGAAGATATTGTGATAATGGTGTTTGTTATCCCTTTGACCA
CTGGGGCCAGGGGACAATGGTCACCGTCTCGAGT (SEQ ID NO: 147)
Light Chain
>N1wc629
CAGGCTGTGCTGACTCAGCCGTCCTCAGTGTCTGGGGCCCCAGGGCAGAGGGTCACCATCTCCTG
CACTGGGAGCAGCTCCAACATCGGGGCAGGTTATGATGTACACTGGTACCAGCAGCTTCCAGGAAC
AGCCCCCAAACTCCTCATCTTTGATAACAAGAATCGGCCCTCAGGGGTCCCTGACCGATTCTCTGGC
TCCAACTCTGGCACCTCAGCCTCCCTGGCCATCACTGGGCTCCAGGCTGAAGATGAGGCTGAATAT
TACTGCCAGTCGTATGACAACAACCTGAGTGGCCGGGTGTTCGGCGGAGGGACCAAGCTGACCGT
CCTA (SEQ ID NO: 148)
>N1wc75
CAGTCTGTGCTGACTCAGCCTGGCTCCGTGTCTGGGTCTCCTGGACAGTCGATCACCATCTCCTGC
ACTGGAACCAGCAGTGACGTTGGTGGTTATAACTATGTCTCCTGGTACCAACAACACCCAGGCAAAG
CCCCCAAACTCATGATTTATGAGGGCAGTAAGCGGCCCTCAGGGGTTTCTAATCGCTTCTCTGGCTC
CAAGTCTGGCAACACGGCCTCCCTGACAATCTCTGGGCTCCAGGCTGAGGACGAGGCTGATTATTA
CTGCAGCTCATATACAACCAGGAGCACTCGAGTTTTCGGCGGAGGGACCAAGCTGACCGTCCTA
(SEQ ID NO: 149)
>N1wc104
TCCTATGTGCTGACTCAGCCACCCTCGGTGTCTGAAGCCCCCAGGCAGACGGTCACCATCTCCTGT
TCTGGAAACAGTTTCAACATCGGGAGATATCCTGTCAACTGGTATCAACAACTCCCAGGGAAGGCTC
CCAAACTCCTCATTTATTATAATAATCTGAGGTTTTCAGGGGTCTCTGACCGATTCTCTGGCTCCAAG
TCTGGCACCTCAGCCTCCCTGGCCATCAGGGATCTCCTGTCTGAGGACGAGGCTGATTACTATTGTT
CGACGTGGGATGACACCCTGAAGGGTTGGGTGTTCGGCGGAGGGACCAAGCTGACCGTCCTA
(SEQ ID NO: 150)

B.3- Additional Notch Antibodies

Heavy Chain
> hN1S3-067
GAGGTGCAGCTGGTGCAGTCTGGGGCCGAGGTGAAGAAGCCTGGGGCCTCAGTGAGGATTTCCTG
CAAGACATCTGGATTCACCTTTACCAGCTACTTTATCCACTGGGTGCGGCAGGCCCCAGGACAAAG
GCCAGAGTGGATGGGCGTTATCAACCCAAGCCGTGGCAACGCAGACTACGCACCGAGGTTCCGTG
GCAGAGTCACCATGACCCGGGACAAGTCCACGCACACTGTTTACATGGATCTGAAGAGCCTCAGAT
CTGACGACGCGGCCATATATTACTGTGCCAGAGATCGGCTTGGTGGCCTTCTTGATTACTACGACAG
TAGTGATTCTTCGAAGAATTTTGATGCTTTTGATTTCTGGGGCCAAGGAACCCTGGTCACCGTCTCGA
GT (SEQ ID NO: 151)
> hN1S3-073
CAGGTCCAGCTGGTGCAGTCTGGGGCTGAGGTGAAGAAGCCTGGGGCCTCAGTGAGGATTTCCTG
CAAGACATCTGGATTCACCTTTACCAGCTACTTTATCCACTGGGTGCGGCAGGCCCCAGGACAAAG
GCCAGAGTGGATGGGCGTTATCAACCCAAGCCGTGGCAACGCAGACTACGCACCGAGGTTCCGTG
GCAGAGTCACCATGACCCGGGACAAGTCCACGCACACTGTTTACATGGATCTGAAGAGCCTCAGAT
CTGACGACGCGGCCATATATTACTGTGCCAGAGATCGGCTTGGTGGCCTTCTTGATTACTACGACAG
TAGTGATTCTTCGAAGAATTTTGATGCTTTTGATTTCTGGGGCCAGGGAACCCTGGTCACCGTCTCG
AGT (SEQ. ID. NO. 152)
> hN1S3-116
GAAGTGCAGCTGGTGCAGTCTGGGGCTGAGGTGAAGAAGCCTGGGGCCTCAGTGAAGGTCTCCTG
CAAGGCTTCTGGATACACCTTCACCGATTACTATATGCACTGGGTACGACAGGCCCCTGGACAAGGA
CTTGAGTGGATGGGATGGATCAACCCTAACAGTGGTGGCACATACTTTCCACAGAACTTTCAGGGCC
GGGTCACCATGACCAGCGACCCGTCCATCAGCGCAGCCTACATGGAATTGAGTAACCTGAGATCTG
ACGACACGGCCGTGTATTTCTGTGCAAGAGGCGCTTACGATTACGTTTGGGGGAGTCATCGTTATAG
CGGCGATGCTTTCGATTTCTGGGGCCAAGGAACCCTGGTCACCGTCTCCTCA (SEQ ID NO: 153)
> hN1S3-193
CAGGTGCAGCTGGTGCAGTCTGGGGCTGAGGTGAAGAAGCCTGGGGCCTCAGTGAAGGTCTCTTG
CAAGGCTTCTGGATACAACTTCACCGGCTACTATATGCACTGGGTGCGACAGGCCCCTGGACAAGG
GCTTGAGTGGATGGGATGGATCAACCCTAACAGTGGTGGCACAAACTATGCACAGAAGTTTCAGGG
CAGGGTCACCATGACCAGGGACACGTCCATCAGCACAGCCTACATGGAGCTGAGCAGGCTGAGATC
TGACGACACGGCCGTGTATTACTGTGCGACAGACTCCTTTGACTACTGGGGCCAGGGAACCCTGGT
CACCGTCTCGAGT (SEQ ID NO: 154)
>N1wc14
GAAGTGCAGCTGGTGCAGTCTGGGGGAGGCTTGGTACAGCCCGGCAGGTCCCTGAGACTCTCCTG
TGCGGCCTCTGGATTCACCTCTGATGATTATGCCATGCACTGGGTCCGGCAAGCTCCAGGGAAGGG
CCTGGACTAGGTCACAGCTATCACTTGGAATAGTGGTCACAAGGACTATGCGGACTCTGTGAAGGG
CCGATTCGCCGTCTCCAGAGACAACGCCAAGAACGCCCTGTATCTGCAAATGAACAGTCTGAGACC
TGAGGACACGGCCGTATATTACTGTGCGAAAGCCTCGTACCTCAGCACCTCGTCCTCCCTTGACTAC
TGGGGCAGAGGGACAATGGTCACCGTCTCGAGT (SEQ ID NO: 155)
>N1wc23
GAAGTCCAGCTGGTGCAGTCTGGGGCTGAGGTGAAGAAGCCTGGGGCCTCAGTGAAGGTCTCCTG
CAAGGCTTCTGGATACAACTTCACCGGCTACTATATACACTGGGTGCGACAGGCCCCTGGACAAGG
GCTTGAGTGGATGGGATGGATCAACCCTAACAGTGGTGGCACAAACTATGCACAGAAGTTTCAGGG
CAGGGTCATCATGACCAGGGACACGTCCATCAGCACAGCCTACATGGAGCTGAGCAGGCTGAGATC
TGACGACACGGCCGTGTATTACTGTGCGACAGACTCCTTTGACTACTGGGGCAGAGGAACCCTGGT
CACCGTCTCGAGT (SEQ ID NO: 156)
>N1wc33
GAGGTGCAGCTGGTGGAGTCTGGGGGAGACTTAGTTCAGCCTGGGGGGTCCCTGAGACTCTCCTG
TGCAGCCTCTGGATTCACCTTCAGTGATTCCTGGATGCACTGGGTCCGCCAAGTTCCAGGGAAGGG
ACTGGAGTGGGTCTCACATATTGGTATTGATGGGATTACCACAAACTACGCGGACTCCGTGAAGGG
CCGATTCACCATCTCCAGGGACAACGCCAAGAACACCCTGTATCTGCAAATGAACAATCTGAGAGCC
GAAGACACGGCTGTATATTACTGTGCCAGGAATGTAGGGTGGGAGTCTCGCCCTTGGGGCCAAGGA
ACCCTGGTCACCGTCTCGAGT (SEQ ID NO: 157)
>N1wc48
CAGGTCCAGCTGGTGCAGTCTGGAGCTGAGGTGAAGAAGCCTGGGGCTACAGTGAAAATCTCCTGC
AAGGTTTCTGGATACACCTTCACCGACTACTACATCCACTGGGTGCAACAGGCCCCTGGAAAAGGG
CTTGAGTGGATGGGACTTGTTGATCCTGAAGATGGTGAAACAATATACGCAGAGAAGTTTCAGGGCA
GAGTCACCATAATTGCGGACACGTCTACAGACACAGCCTACATGGAACTGAGCAGCCTGAGATCTG
AGGACACGGCCGTCTATTACTGTGCAACTGGGCCGTTCCGTCTTGACTCCTGGGGCCAAGGGACAA
TGGTCACCGTCTCGAGT (SEQ ID NO: 158)
>N1wc60
CAGGTGCAGCTGGTGCAGTCTGGGGCTGAGGTGAAGAAGCCTGGGGCCTCAGTGAAGGTCTCCTG
CAAGGCTTCTGGATACAACTTCACCGGCTACTATATGCACTGGGTGCGACAGGCCCCTGGACAAGG
ACTTGAGTGGATGGGATGGATCAACCCTAACAGTGGTGGCACAAACTATGCACAGAAGTTTCAGGG
CAGGGTCACCATGACCAGGGAAACGTCCATCAGCACAGCCTACATGGAGCTGAGCAGGCTGAGATC
TGACGACACGGCCGTGTATTACTGTGCGACAGACTCCTTTGACTACTGGGGCCGAGGCACCCTGGT
CACCATCTCGAGT (SEQ ID NO: 159)
>N1wc99
CAGGTCCAGCTGGTGCAGTCTGGGGCTGAGGTGAAGAAGCCTGGGGCCTCAGTGAAGGTCTCCTG
CAAGGCTTCTGGTTACACCTTTACCAGCTATGGTATCAGCTGGGTGCGACAGGCCCCTGGACAAGG
GCTTGAGTGGATGGGATGGATCAGCGCTTACAATGGTAACACAAACTATGCACAGAAGCTCCAGGG
CAGAGTCACCATGACCACAGACACATCCACGAGCACAGCCTACATGGAGCTGAGGAGCCTGAGATC
TGACGACACGGCCGTGTATTACTGTGCGAGACTGGCCAGCCGTGCTTTTGATATCTGGGGCAGGGG
CACCCTGGTCACCGTCTCGAGT (SEQ ID NO: 160)
>N1wc103
CAGGTACAGCTGCAGCAGTCAGGGGCTGAGGTGAAGAAGCCTGGGGCCTCAGTGAAGGTCTCTTG
CAAGGCTTCTGGATACAACTTCACCGGCTACTATATGCACTGGGTGCGACAGGCCCCTGGACAAGG
GCTTGAGTGGATGGGATGGATCAACCCTAACAGTGGTGGCACAAACTATGCACAGAAGTTTCAGGG
CAGGGTCACCATGACCAGGGACACGTCTATCAGCACAGCCTACGTGGAGCTGAGCAGGCTGAGATC
TGACGACACGGCCGTGTATTACTGTGCGACAGACTCCTTTGACTACTGGGGCCGGGGCACCCTGGT
CACCGTCTCGAGT (SEQ ID NO: 161)
>N1wc106
CAGGTCCAGCTGGTACAGTCTGGGGCTGAGGTGAAGAGGCCTGGGGCCTCAGTTAACCTTTCCTGC
AAGGCATCTGGATACTCCTTCAGCAGATACTATATCCACTGGGTGCGACAGGCCCCTGGACAGGGA
CTTGAGTTGATGGGACGGATCAACCCTGGAGGTGGTACCACAACCTACGCACAGAAATTCCAGGGC
AGAGTCACCCTGTCCAGGGACACGTCCACGAACACCATCTTCATGGAACTGAACGGCCTCACATCT
GAAGACACGGCCATGTATTATTGTGCGAGGTCGAACTACGATATTTTGGCTGGTTATGGGCCTGATG
CTTTTGATTTCTGGGGCCGGGGCACCCTGGTCACCGTCTCGAGT (SEQ ID NO: 162)
>N1wc110
GAAGTGCAGCTGGTGCAGTCTGGGGCTGAGGTGAAGAAGCCTGGGGCCTCAGTGAAGGTCTCTTG
CAAGGCTTCTGGATACAACTTCACCGGCTACTATATGCACTGGGTGCGACAGGCCCCTGGACAAGG
GCTTGAGTGGATGGGATGGATCAACCCTAACAGTGGTGGCACAAACTATGCACAGAAGTTTCAGGG
CAGGGTCACCATGACCAGGGACACGTCCATCAGCACAGCCTACATGGAGCTGAGCAGGCTGAGATC
TGACGACACGGCCGTGTATTACTGTGCGACAGACTCCTTTGACTACTGGGGCCAGGGGACAATGGT
CACCGTCTCGAGT (SEQ ID NO: 163)
>N1wc112
GAGGTGCAGCTGGTGGAGTCTGGGGGGGGCTTGGCTCAGCCTGGAAAGTCCCTCAGAATATCCTG
TGCAGCCTCTGGATTCACCTTTGGCGACTACGCCATGACGTGGGTCCGCCAGGCTCCAGGGAAGG
GACTGGAGTGGGTCTCAAGTATAAGTGGTAGTGGTTCTGGCACATATTATACAGACTCCGTGAAGGG
CCGCTTCGCCATCTCCAGAGACAACTCCAAGAACACACTATATCCGCAGATGAACAGCCTGGCAGC
CGAGGACACGGCCATTTATTTCTGTGCAAAAGATCAGACAGATGTGACTATCCGGGACTTTGACTAC
TGGGGCAGGGGAACCCTGGTCACCGTCTCGAGT (SEQ ID NO: 164)
>N1wc137
CAGGTGCAGCTGGTGCAGTCTGGAGCTGAGGTGAAGAAGCCTGGGGCCTCAGTGAAGGTCTCCTG
CAAGGCTTCTGGTTACACCTTTACCAACTATGGTCTCAGCTGGGTGCGACAGGCCCCTGGACAAGG
GCTTGAGTGGATGGGATGGATCAGCGGTTACAATGATAACACAAGCTATGCACAGAAGTTCCAGGA
CAGAATCACTATGACCACAGACACATCCACGAGCACAGCCTCCATGGAGCTGAGGAGCCTGAGATC
TGACGACACGGCCGTGTATTACTGTGCGTTTAGTTATTATGATAGTAGTGGTTATTTCAACTGGGGCC
AGGGGACAATGGTCACCGTCTCGAGT (SEQ ID NO: 165)
>N1wc140
CAGGTACAGCTGCAGCAGTCAGGGGCTGAGGTAAAGAAGCCTGGGTCCTCGGTGAAGGTCTCCTG
CAGGGCTTCTGGAGGCACCTTCAGCAACTACGCTATCAGCTGGGTGCGACAGGCCCCTGGACAAG
GCCTTGAGTGGATGGGACGGATCATCCCTATCTTTGGAGGAGCACACTACGCACAGAAGTTACAGG
GCAGAGTCTCGATTACCGCGGACGAGTCGACGAGCACAGCCCACATGGAGCTGAGCAGCCTGAGA
TCTGAGGACGCGGCCGTGTACTACTGTGCGAGCGGAGCGTATTACGATGTTATGGGTAATTATCCTT
ACTCAGGTATGGACGTCTGGGGCCGAGGCACCCTGGTCACCGTCTCGAGT (SEQ ID NO: 166)
>N1wc142
GAGGTGCAGCTGGTGCAGTCTGGGGCTGAGGTGAAGAAGCCTGGGGCCTCAGTTAACCTTTCCTG
CAAGGCATCTGGATACTCCTTCAGCAGGTACTATATCCACTGGGTGCGACAGGCCCCTGGACAAGG
ACTTGAGTTGATGGGACGGATCAACCCTGGAGGTGGTACCACAACCTACGCACAGAAATTCCAGGG
CAGAGTCACCCTGTCCAGGGACACGTCCACGAACACCATCTTCATGGAACTGAACGGCCTCACATC
TGAAGACACGGCCATGTATTATTGTGCGAGGTCGAACTACGATATTTTGGCTGGTTATGGGCCTGAT
GCTTTTGATTTCTGGGGCCGAGGGACAATGGTCACCGTCTCGAGT (SEQ ID NO: 167)
>N1wc145
GAGGTGCAGCTGGTGGAGTCTGGAGCTGAGGTGAAGAAGCCTGGGGCCTCAGTGAAGGTCTCCTG
CAAGGCTTCTGGTTACACCTTTACCACCTATGGTATCAGCTGGGTGCGACAGGCCCCTGGACAAGG
GCTTGAGTGGATGGGATGGATCAGCACTTACAATGGTAACACAAAATATGCACAGAAGCTCCAGGG
CAGAGTCACCATGACCACAGACACATCCACGAGCACAGCCTACATGGAGCTGAGGAGCCTGAGATC
TGACGACACGGCCGTGTATTACTGTGCGAGAGATGCAAGGAAAGCCTTTGATATCTGGGGCAGAGG
CACCCTGGTCACCGTCTCTTCA (SEQ ID NO: 168)
>N1wc152
CAGGTGCAGCTGGTGCAGTCTGGGGGAGGGTTGGTCCAGCCTGGGGGGTCCCTAAGACTGTCCTG
TGGAGCCTCTGGGTTCACCTTTAGTAGCCATTGGATGAGCTGGGTCCGCCGGCCTCCAGGGAGGG
GGCTGGAATGGGTGGCCAACATAAACGAGGGTGGCAGTGCGGAATATTATGCGGACTCTCTGAAGG
GCCGATTCACCATCTCCCGAGACAACGCCAAGAACTCCCTGTTTCTGCAAATGGACAGCCTGAGAG
CCGAGGACACGGCCGTCTATTACTGTGTGAGAGATCAATTCCACAGTAACTACGACTGGGGCCAGG
GGACAATGGTCACCGTCTCGAGT (SEQ ID NO: 169)
>N1wc157
CAGGTCCAGCTGGTGCAGTCTGGAGCTGGGCTGAAGAGGCCGGGGACCTCAGTGAAAATATCCTG
CAAGACTTCTGGATACATCTTCAGTCAATATCCCATGCACTGGGTGCGCCAGGCCCCCGGACAAGG
GCTTGAGTGGGTGGCATGGGTCGACACTGGCAATGGTACCACAAGATATTCGCCGAATTTCCAGGG
CAGAGCCACCGTTAGTGGAGACACATCCGCGAACACAGGCTACTTGGAATTGAGAAGCCTGAGATT
TACCGACACGGCTGTTTATTACTGTGCGACTAACGCCTTTGACTACTGGGGCCGAGGCACCCTGGT
CACCGTCTCGAGT (SEQ ID NO: 170)
>N1wc158
GAGGTCCAGCTGGTACAGTCTGGGGCTGAGGTGAAGAAGCCTGGGGCCTCAGTGAAGGTCTCCTG
CAAGGCTTCTGGATACAACTTCACCGGCTACTATATGCACTGGGTGCGACAGGCCCCTGGACAAGG
GCTTGAGTGGATGGGATGGATCAACCCTAACAGTGGTGGCACAAACTATGCACAGAAGTTTCAGGG
CAGGGTCACCATGACCAGGGACACGTCCATCAGCACAGCCTACATGGAGCTGAGCAGGCTGAGATC
TGACGACACGGCCGTGTATTACTGTGCGACAGACTCCTTTGACTACTGGGGCCGAGGCACCCTGGT
CACCGTCTCGAGT (SEQ ID NO: 171)
>N1wc160
CAGGTGCAGCTGCAGGAGTCCGGAGCTGAGGTGAAGAAGCCTGGGGCCTCAGTGAAGGTCTCTTG
CAAGGCTTCTGGATACAACTTCACCGGCTACTATATGCACTGGGTGCGACAGGCCCCTGGACAAGG
GCTTGAGTGGATGGGATGGATCAACCCTAACAGTGGTGGCACAAACTATGCACAGAAGTTTCAGGG
CAGGGTCACCATGACCAGGGACACGTCCATCAGCACAGCCTACATGGAGCTGAGCAGGCTGAGATC
TGACGACACGGCCGTGTATTACTGTGCGACAGACTCCTTTGACTACTGGGGCCGGGGGACAATGGT
CACCGTCTCGAGT (SEQ ID NO: 172)
>N1wc175
CAGGTCCAGCTGGTGCAGTCTGGGGCTGAGGTGAAGAAGCCTGGGGCCTCAGTGAAGGTCTCCTG
CAAGGCTTCTGGATACAACTTCACCGGCTACTATATGCACTGGGTGCGACAGGCCCCTGGACAAGG
GCTTGAGTGGATGGGATGGATCAACCCTAACAGTGGTGGCACAAACTATGCACAGAAGTTTCAGGG
CAGGGTCACCATGACCAGGGACACGTCCATCAGCACAGCCTACATGGAGCTGAGCAGGCTGAGATC
TGACGACACGGCCGTGTATTACTGTGCGACAGACTCCTTTGACTACTGGGGCCGGGGCACCCTGGT
CACCGTCTCGAGT (SEQ ID NO: 173)
>N1wc179
GAGGTCCAGCTGGTGCAGTCTGGGGCTGAGGTGAAGAAGCCTGGGGCCTCAGTGAAGGTCTCTTG
CAAGGCTTCTGGATACAACTTCACCGGCTACTATATGCACTGGGTGCGACAGGCCCCTGGACAAGG
GCTTGAGTGGATGGGATGGATCAACCCTAACAGTGGTGGCACAAACTATGCACAGAAGTTTCAGGG
CAGGGTCACCATGACCAGGGACACGTCCATCAGCACAGCCTACATGGAGCTGAGCAGGCTGAGATC
TGACGACACGGCCGTGTATTACTGTGCGACAGACTCCTTTGACTACTGGGGCCAGGGGACAATGGT
CACCGTCTCGAGT (SEQ ID NO: 174)
>N1wc191
CAGGTGCAGCTGGTGCAATCTGGGGCTGAGGTGAAGAAGCCTGGGGCCTCAGTGAAGGTCTCTTG
CAAGGCTTCTGGATACAACTTCACCGGCTACTATATGCACTGGGTGCGACAGGCCCCTGGACAAGG
GCTTGAGTGGATGGGATGGATCAACCCTAACAGTGGTGGCACAAACTATGCACAGAAGTTTCAGGG
CAGGGTCACCATGACCAGGGACACGTCCATCAGCACAGCCTACATGGAGCTGAGCAGGCTGAGATC
TGACGACACGGCCGTGTATTACTGTGCGACAGACTCCTTTGACTACTGGGGCCAAGGGACAATGGT
CACCGTCTCGAGT (SEQ ID NO: 175)
>N1wc202
GAGGTGCAGCTGGTGCAGTCTGGGGCTGAGGTGAAGAAGCCTGGGGCCTCAGTGAAGGTCTCTTG
CAAGGCTTCTGGATACAACTTCACCGGCTACTATATGCACTGGGTGCGACAGGCCCCTGGACAAGG
GCTTGAGTGGATGGGATGGATCAACCCTAACAGTGGTGGCACAAACTATGCACAGAAGTTTCAGGG
CAGGGTCACCATGACCAGGGACACGTCCATCAGCACAGCCTACATGGAGCTGAGCAGGCTGAGATC
TGACGACACGGCCGTGTATTACTGTGCGACAGACTCCTTTGACTACTGGGGCCGGGGCACCCTGGT
CACCGTCTCGAGT (SEQ ID NO: 176)
>N1wc520
CAGGTGCAGCTGGTGCAGTCTGGGGCTGAGGTGAAGAAGCCTGGGGCCTCAGTGAAGGTCTCTTG
CAAGGCTTCTGGATACAACTTCACCGGCTACTATATGCACTGGGTGCGACAGGCCCCTGGACAAGG
GCTTGAGTGGATGGGATGGATCAACCCTAACAGTGGTGGCACAAACTATGCACAGAAGTTTCAGGG
CAGGGTCACCATGACCAGGGACACGTCCATCAGCACAGCCTACATGGAGCTGAGCAGGCTGAGATC
TGACGACACGGCCGTGTATTACTGTGCGACAGACTCCTTTGACTACTGGGGGCGAGGGACCACGGT
CACCGTCTCGAGT (SEQ ID NO: 177)
>N1wc625
CAGGTGCAGCTGGTGCAGTCTGGGGCTGAGGTGAAGAAGCCTGGGGCCTCAGTGAAGGTCTCTTG
CAAGGCTTCTGGATACAACTTCACCGGCTACTATATGCACTGGGTGCGACAGGCCCCTGGACAAGG
GCTTGAGTGGATGGGATGGATCAACCCTAACAGTGGTGGCACAAACTATGCACAGAAGTTTCAGGG
CAGGGTCACCATGACCAGGGACACGTCCATCAGCACAGCCTACATGGAGCTGAGCAGGCTGAGATC
TGACGACACGGCCGTGTATTACTGTGCGACAGACTCCTTTGACTACTGGGGCCAGGGGACAATGGT
CACCGTCTCGAGT (SEQ ID NO: 178)
Light Chain
> hN1S3-067
AATTTTATGCTGACTCAGCCCCACTCTGTGTCGGAGTCTCCGGGGAAGACGGTAATCATCTCCTGCA
CTCGCAGCAGTGGCAGCATTGCCAGCAACTATGTGCAGTGGCTCCAGCAGCGCCCGGGCAGTTCC
CCCACCACTGTGATTTATGACGATAATCGAAGACCCTCTGGAGTCCCTGATCGGTTTTCTGGCTCCA
TCGACGGTTCCTCCAACTCGGCCTCCCTCACCATCTCTGGCCTGAAGACAGAGGACGAGGCTGATT
ACTACTGTCAGTCTTATGATCGATTCGACCATGTGGTTTTCGGCGGAGGGACCAAGCTGACCGTCCTA
(SEQ ID NO: 179)
> hN1S3-073
GACATCCAGATGACCCAGTCTCCATCCTCACTGTCTGCATTTGTGGGAGACAGAGTCACCATCACTT
GTCGGGCGAGTCAGGGCATTAATAATTATTTAGCCTGGTTTCAGCAGAAGCCAGGGAAAGCCCCTAA
GTCCCTGATCTACGCCGCCTCCACTTTGCGAAGTGGGGTCCCACCAAGGTTCAGCGGCAGTGGATC
TGGGACAGATTTCACTCTCACCATCAGCAGCCTGCAGCCTGAAGATTTTGCAACTTATTACTGCCAA
CAGTATGATAGTTACCCTCACACCTTCGGCCAGGGGACACGACTGGAGATTAAA (SEQ ID NO: 180)
> hN1S3-116
CAGTCTGTGCTGACTCAGCCACCCTCAGCGTCTGGGACCCCCGGGCAGAGGGTCACCATCTCTTGT
TCTGGAAGCAGCTCCAACATCGGGAGTAACACTGTAAATTGGTACCAGCGACTCCCAGGAGCGGCC
CCCCAACTCCTCATCTACAATAATGACCAGCGGCCCTCAGGGATCCCTGACCGATTCTCTGGCTCCA
AGTCTGGCACCTCAGGTTCCCTGGTCATCAGTGGGCTCCAGTCTGAAGATGAGGCTGATTACTACTG
TGCGTCATGGGATGACAGTCTGAATGGTCGGGTGTTCGGCGGAGGGACCAAGCTGACCGTCCTA
(SEQ ID NO: 181)
> hN1S3-193
TCCTATGAGCTGACTCAGCCACCCTCAGCGTCTGGGACCCCCGGGCAGAGGGTCACCATCTCTTGT
TCTGGAAGCAGCTCCAACATCGGAAGTAATACTGTAAACTGGTACCAGCAGCTCCCAGGAACGGCC
CCCAAACTCCTCATCTATAGTAATAATCAGCGGCCCTCAGGGGTCCCTGACCGATTCTCTGGCTCCA
AGTCTGGCACCTCAGCCTCCCTGGCCATCAGTGGGCTCCAGTCTGAGGATGAGGCTGATTATTACT
GTGCAGCATGGGATGACAGCCTGAATGGTTATGTCTTCGGAACTGGGACCAAGCTGACCGTCCTA
(SEQ ID NO: 182)
>N1wc14
TCCTATGTGCTGACTCAGCCACCCTCGGTGTCAGTGGCCCCAGGACAGACGGCCAGGATTACCTGT
GGGGGAAACAACATTGGAAGTAAAAGTGTGCACTGGTACCAGCAGAAGCCAGGCCAGGCCCCTGT
GCTGGTCATCTATGAGGACAGCAAACGACCCTCCGGGATCCCTGAGAGATTCTCTGGCTCCAGCTC
AGGGACAATGGCCACCTTGACTATCAGTGGGGCCCAGGTGGAGGATGAAGCTGACTACTACTGTTA
CTCAACAGACAGCAGTGGTAATCATAGGGTCTTCGGAACTGGGACCAAGGTCACCGTCCTA
(SEQ ID NO: 183)
>N1wc23
CAGTCTGTGCTGACTCAGCCACCCTCAGCGTCTGGGACCCCCGGGCAGAGGGTCACCATCTCTTGT
TCTGGAAGCTACTCCAACATCGGAAGTAATTATGTCTACTGGTACCAGCAGTTCCCAGGAACGGCCC
CCAAACTCCTCATCTATACGAATAATCAGCGGCCCTCAGGGGTCCCTGACCGATTCTCTGGCTCCAA
GTCTGGCTCCTCAGCCTCCCTTGCCATCAGTGGGCTCCGGTCCGAGGATGAGGCTGATTATTACTG
TGCAGCATGGGATGACAGTGTGGGTGTCCTGTTATTCGGCGGGGGGACCAAGCTGACCGTCCTA
(SEQ ID NO: 184)
>N1wc33
TCCTATGTGCTGACTCAGCCACCCTCAGCGTCTGGGGCCCCCGGCCAGAGGGTCACCATCTCTTGT
TCTGGAAGCGACTCCAACATCGGACGTAACACTGTTAACTGGTACCAGCAGCAGCTCCCTGGAACG
GCCCCCACACTCCTCATCTATACTAATAATCAGCGGCCCTCAGGGGTCCCTGACCGATTCTCTGGCT
CCAAGTCTGGCACCTCAGCCTCCCTGGCCATCAGTGGGCTCCAGTCTGGGGATGAGGCTGATTATT
ACTGTGCAGCATGGGATGACAGCCTCAATGCTTATTTTTTCGGGCCTGGGACCAAGCTGACCGTCCTA
(SEQ ID NO: 185)
>N1wc48
CAGTCTGTGTTGACGCAGCCGCCCTCAGTTTCTGGGGCCCCAGGGCAGAGGGTCACCATCTCCTGC
ACTGGGAGCAGCTCCAACATCGGGGCAGGTTATGATGTACACTGGTACCAGCAGCTTCCAGGATCA
GCCCCCAAACTCCTCATCTATGGTAACAACAATCGGCCCTCAGGGGTCCCTGACCGATTCTCTGGCT
CCAAGTCTGGCACCTCAGCCTCCCTGGCCATCACTGGGCTCCAGGCTGAGGATGAGGCTGATTATT
ACTGCCAGTCCTTTGACAACAGGCTGAGTGATTTTAATGTCTTCGGAACTGGGACCAAGGTCACCGT
CCTA (SEQ ID NO: 186)
>N1wc60
CAGTCTGTGCTGACGCAGCCGCCCTCAGCGTCTGGGACCCCCGGGCAGAGGGTCACCATCTCTTG
TTCTGGAAGCAGCTCCAACATCGGAAGTAATTATGTATACTGGTACCAGCAGCTCCCAGGAACGGCC
CCCAAACTCCTCATCTATAGGAATAATCAGCGGCCCTCAGGGGTCCCTGACCGATTCTCTGGCTCCA
AGTCTGGCACCTCAGCCTCCCTGGCCATCAGTGGGCTCCGGTCCGAGGATGAGGCTGATTATTACT
GTGCAGCATGGGATGACAGCCTGAGTGGTCTGGTATTCGGCGGAGGGACCAAGCTGACCGTCCTA
(SEQ ID NO: 187)
>N1wc99
CAGTCTGTGCTGACTCAGCCTGCCTCCGTGTCTGGGTCTCCTGGACAGTCGATCACCATCTCCTGC
ACTGGAACCAGCAGTGACGTTGGTGGTTATAACTATGTCTCCTGGTACCAACAACACCCAGGCAAAG
CCCCCAAACTCATGATTTATGAGGGCAGTAAGCGGCCCTCAGGGGTTTCTAATCGCTTCTCTGGCTC
CAAGTCTGGCAACACGGCCTCCCTGACAATCTCTGGGCTCCAGGCTGAGGACGAGGCTGATTATTA
CTGCAGCTCATATACAACCAGGAGCACTCGAGTTTTCGGCGGAGGGACCAAGCTGACCGTCCTA
(SEQ ID NO: 188)
>N1wc103
CAGTCTGTGTTGACGCAGCCGCCCTCAGCGTCTGGGACCCCCGGGCAGAGGGTCACCATCTCTTGT
TCTGGAAGCAGCTCCAACATCGGAAGTAATCCTGTAAACTGGTACCAGCAGCTCCCAGGAACGGCC
CCCAAACTCCTCATCTATAGTAATAATCAGCGGCCCTCAGGGGTCCCTGACCGATTCTCTGGCTCCA
AGTCTGGCACCTCAGCCTCCCTGGCCATCAGTGGGCTCCACTCTGAGGATGAGGCTGATTATTACT
GTGCAGCATGGGATGACAGCCTGAATGGGTCTTCTGTCTTCGGAACTGGGACCAAGCTGACCGTCC
TA (SEQ ID NO: 189)
>N1wc106
CAGGCTGTGCTGACTCAGCCGTCCTCAGTGTCTGGGGCCCCAGGGCAGAGGGTCACCATCTCCTG
CACTGGGAGCAGCTCCAACATCGGGGCAGATAATGATGTTCATTGGTACCAAAAGTTTCCAGGAACA
GCCCCCAAACTCCTCATCTTTTCTAACAACAATCGGCCCTCAGGGGTCCCTGACCGGTTCTCTGGCT
CCAAGTCTGGCACCTCAGCCTCTCTGGCCATCACTGGACTCCAGGCTGACGATGAGGCTGATTATTA
CTGCCAGTCATATGATAGCGGCCTGACGAGGGAGTTGTTCGGCGGAGGGACCAAGCTGACCGTCC
TA (SEQ ID NO: 190)
>N1wc110
CAGTCTGTCGTGACGCAGCCGCCCTCAGCGTCTGGGTCCCCCGGGCAGAGGGTCACCATCGCTTG
TTCTGGAAGCAGCTCCAACATCGGAAGTAATACTGTAAACTGGTACCAGCACGTTCCAGGAACGGCC
CCCAAACTCCTCATCTATAATAATAATCAGCGGCCCTCAGGGGTCCAAGATCGATTCTCTGGCTCCA
AGTCTGACACTTCAGCCTCCCTGGCCATCAGTGGTCTCCAGGCTGAGGATGAGGCTGTTTATTACTG
TGCGACATGGGATGACAGCCTGATTGGTCTAGCGTTCGGCGGAGGGACCAAGCTGACCGTCCTA
(SEQ ID NO: 191)
>N1wc112
TCCTATGAGCTGACTCAGCCACCCTCGGTGTCGGTGGCCCCGGGACAGACGGCCAGGATTTCCTGT
GGGGGAGACAACCTTGGACGTAAAAGCGTGCACTGGTACCAGCAGAAGCCAGGCCAGGCCCCTGT
GCTGGTCATCTATGAGGACAGCAAACGACCCTCCGGGATCCCTGAGAGATTCTCTGGCTCCAGCTC
AGGGACAATGGCCACCTTGACTATCAGTGGGGCCCAGGTGGAGGATGAAGCTGACTACTACTGTTA
CTCAACAGACAGCAGTGGTAATCATAGGGTGTTCGGCGGAGGGACCAAGGTCACCGTCCTA
(SEQ ID NO: 192)
>N1wc137
CAGGCTGTGCTGACTCAGCCGTCCTCAGTGTCTGGGGCCCCAGGGCAGAGGGTCACCGTCTCCTG
CACTGGGAGCAGCTCCAATATCGGGACAGGTTATGCTGTACACTGGTACCAGCAGCTTCCAGGAAC
AGCCCCCAGACTCCTCATCTTTGGAAACAACAATCGGCCCTCAGGGGTCCCTGACCGATTCTCTGG
CTCCAAGTCTGGCACCTCAGCCTCCCTGGTCATCACTGGGCTCCAGGCTGAGGATGAGGCTGATTA
TTACTGCCAGTCCTTTGACACCCTTAGTGGTTCGAGGGTGTTCGGCGGAGGGACCAAGGTCACCGT
CCTA (SEQ ID NO: 193)
>N1wc140
TCCTATGTGCTGACTCAGCCACCCTCGGTGTCAGTGTCCCCCGGCCAGACGGCCAAGATCACCTGT
GGGGGAGACAAGATTGAGACAAAAAGTGTGCACTGGTACCAGCAGAAGCCGGGCCAGGCCCCTGT
TCTGGTCATCTATGAGGACACCAAACGACCCTCCGGGATCTCTGAGAGATTGTCGGGCTCCAGCGC
AGGGACAGTGGCCACGTTGACCATCACTGGGGCCCAGGTGGACGATGAGGCTGACTACTTTTGTTA
TTCCACAGACGCCACCGGTACTGAAAGGGTCTTCGGCGGAGGGACCAAGCTGACCGTCCTA
(SEQ ID NO: 194)
>N1wc142
CAGTCTGTGCTGACTCAGCCACCCTCAGTGTCTGGGGCCCCAGGGCAGAGGGTCACCATCTCCTGC
ATTGGGAGCAACTCCAACATCGGGGCAGGTCATGATGTACACTGGTACCAGCAGTTTCCAGGAACA
GCCCCCAAACTCCTCATCTATGATAACACCAACCGGCCCTCAGGGGTCCCTGACCGATTCTCTGGCT
CCAAGTCTGGCACCTCAGTTTCCCTGGCCATCACTGGGCTCCAGGCTGAGGATGAGGCTGATTATT
ACTGCCAGTCCTATGACAGCAGCCTGGGTGAGGTGTTCGGCGGAGGGACCAAGCTGACCGTCCTA
(SEQ ID NO: 195)
>N1wc145
CACGTTATACTGACTCAACCTCGCTCAGTGTCTGGGTCTCCTGGACAGTCGATCACCATCTCCTGCA
CTGGAACCAGCAGTGACGTTGGTGGTTATAACTATGTCTCCTGGTACCAACAACACCCAGGCAAAGC
CCCCAAACTCATGATTTATGAGGGCAGTAAGCGGCCCTCAGGGGTTTCTAATCGCTTCTCTGGCTCC
AAGTCTGGCAACACGGCCTCCCTGACAATCTCTGGGCTCCAGGCTGAGGACGAGGCTGATTATTAC
TGCAGCTCATATACAACCAGGAGCACTCGAGTTTTCGGCGGAGGGACCAAGCTGACCGTCCTA
(SEQ ID NO: 196)
>N1wc152
CAGGCTGTGCTGACTCAGCCGTCCTCAGTGTCTGGGGCCCCAGGGCAGAGGGTCACCATCTCCTG
CACTGGGAGCAGCTCCAACATCGGGGCACCTTTTGATGTACACTGGTACCAGCAGCTTCCAGGAAC
AGCCCCCAAACTCCTCATCTATGGTAACAGTAATCGGCCCTCAGGAGTCCCTGACCGCTTCTCTGGC
TCCAAGTTTGGCACCTCAGCCTCCCTGGCCATCACTGGGCTCCAGGCTGCGGATGAGGCTGATTAT
TACTGCCAGTCTTATGACAGCAGCCTGAGTGGTTGGGTGTTCGGCGGAGGGACCAAGCTGACCGTC
CTA (SEQ ID NO: 197)
>N1wc157
TCCTATGAGCTGACTCAGCCACCCTCGGTGTCAGTGTCCCCAGGACAAACGGCCAGGATCACCTGC
TCTGGAGATGCATTGCCAGACAAATATGTTCATTGGTACCAGCAGAAGTCAGGCCAGGCCCCTGTCC
TGGTCCTCTTCGACGACAGTAAGCGACCCTCCGGTATCCCTGAGAGATTCTCTGGCTCCAGCTCAG
GGACAGTGGCCACCTTGATTATCAGTGGGGCCCAGGTGGAGGATGAAGGTGACTTCTTCTGTTACT
CAACAGACAGCAGTGGTAATGAAAGGGTTTTCGGCGGAGGGACCAAGCTGACCGTCCTA
(SEQ ID NO: 198)
>N1wc158
CAGTCTGTGCTGACTCAGCCACCCTCAGCGTCTGGGACCCCCGGGCAGAGGGTCACCATCTCTTGT
TCTGGAAGCAGCTCCAACATCGGAAGTAATTCTGTATACTGGTACCAGCAGCTCCCAGGAACGGCC
CCCAAACTCCTCATCTATAGGAATAATCAGCGGCCCTCAGGGGTCCCTGACCGATTCTCTGGCTCCA
AGTCTGGCACCTCAGCCTCCCTGGCCATCAGTGGGCTCCGGTCCGAGGATGAGGCTGATTATTACT
GTGCAGCATGGGATGACAGCCTGAGTGGTCTGGTCTTCGGCGGAGGGACCAAGCTGACCGTCCTA
(SEQ ID NO: 199)
>N1wc160
TCCTATGTGCTGACTCAGCCACCCTCAGCGTCTGGGACCCCCGGGCAGAGGGTCACCATCTCTTGT
TCTGGGAGCAGCTCCAACATCGGAAGTAATACTGTACACTGGTACCAGCAGCTCCCAGAAACGGCC
CCCAAACTCCTCATCTATACTAATAATCAGCGGCCCTCAGGGGTCCCTGACCGATTCTCTGGCTCCA
AGTCTGGCACCTCAGCCTCCCTGGCCATCAGTGGGCTCCAGTCTGAGGACGAGGCTGACTATTACT
GTGCTTCATGGGATGACAGCCTGAAAGCTTATGTCTTCGGAACTAGGACCAAGCTGACCGTCCTA
(SEQ ID NO: 200)
>N1wc175
CAGTCTGTGCTGACTCAGCCACCCTCTGCGTCTGGGACCCCCGGGCAGAGGGTCACCATCTCTTGT
TCTGGAAGCAGGTCCAGCATCGGAAGTAATACTGTAAGCTGGTACCAGCAACTCCCAGGAACGGCC
CCCAAACTCATCATCTATACTAATAATCAGCGGCCCTCCGGGGTCCCTGACCGATTCTCTGGCTCCA
AGTCTGGCACCTCAGCCACCCTGGCCATCAGTGGGCTCCAGTCTGAGGATGAGGCTGATTATTACT
GTGCATCATGGGATGACAGCCTGAATGATTATGTCTTCGGAGTTGGGACCAAGGTCACCGTCCTA
(SEQ ID NO: 201)
>N1wc179
TCCTATGTGCTGACTCAGCCACCCTCAGCGTCTGGGACCCCCGGGCAGAGGGTCACCATCTCTTGT
TCTGGAAGCAGCTCCAACATCGGAAGTAATACTGTAAACTGGTACCAGCAGCTCCCAGGAACGGCC
CCCAAACTCCTCATCTATAATGATAATGAGCGGCCCTCTGGGGTCCCTGACCGATTCTCGGGCTCCA
AGTCTGGCACCTACGCCTCCCTGGCCATCAGTGGGCTCCAGTCTGAGGATGAGGCTGATTATTACT
GTGCAGCTTGGGATGACAGCCTGAATGGTCTGGCTTTCGGCGGAGGGACCAAGCTGACCGTCCTA
(SEQ ID NO: 202)
>N1wc191
CTGCCTGTGCTGACTCAGCCCCCCTCAGCGTCTGGGACCCCCGGGCAGAGGGTCACCATCTCTTGT
TCTGGAAGCAGCTCCAACATCGGAAGTAATATTGTAAACTGGTACCAGCAGCTCCCAGGAACGGCC
CCCAAACTCCTCATCTATACTAGTAATCAGCGGCCCTCAGGGGTCCCTGACCGATTCTCTGGCTCCA
AGTCTGGCACCTCAGCCTCCCTGGCCATCAGTGGGCTCCAGTCTGAGGATGAGGCTGATTATTACT
GTGCAGCATGGGATGACAGCCTGAATGCTGTGGTATTCGGCGGAGGGACCAAGGTCACCGTCCTA
(SEQ ID NO: 203)
>N1wc202
TCCTATGAGCTGACTCAGCCACCCTCAGTTTCTGGGACCCCCGGGCAGAGGGTCACCATCTCTTGT
TCTGGAAGCAGTTCCAACATCGAAAGTAATGCTGTCCATTGGTACCAACACCTCCCAGGAAGGGCCC
CCAAACTCCTCATCTTTAGTCATAATCAGCGGCCCTCAGGTGTCCCTGCCCGCTTCTCTGGCTCCAA
GTCTGGCACCTCAGCCTCCCTGGCCATCAGTGGGCTCCAGTCTGAGGATGAGGCTGACTATTACTG
TGCAGCTTGGGATGACAGCCTGAGTGGTTATGTCTTCGCATCTGGGACCAAGCTGACCGTCCTA
(SEQ ID NO: 204)
>N1wc520
TCCTATGTGCTGACTCAGCCACCCTCAGTTTCTGGGACCCCCGGGCAGAGGGTCACCATCTCTTGTT
CTGGAAGCAGTTCCAACATCGAAAGTAATGCTGTCCATTGGTACCAACACCTCCCAGGAAGGGCCC
CCAAACTCCTCATCTTTAGTCATAATCAGCGGCCCTCAGGTGTCCCTGCCCGCTTCTCTGGCTCCAA
GTCTGGCACCTCAGCCTCCCTGGCCATCAGTGGGCTCCAGTCTGAGGATGAGGCTGACTATTACTG
TGCAGCTTGGGATGACAGCCTGAGTGGTTATGTCTTCGCATCTGGGACCAAGGTCACCGTCCTA
(SEQ ID NO: 205)
>N1wc625
CAGTCTGTGCTGACTCAGCCACCCTCAGCGTCTGGGACCCCCGGGCAGAGGGTCACCATCTCTTGT
TCTGGAGGCAGATCCAATATCGGAACTAATTATGTGTACTGGTACCAGAAATTACCAGGCACGGCCC
CCAAATCCCTCATCTATACTACTAATCAGCGCCCCTCAGGGGTCCCTGACCGATTCTCTGGCTCCAA
GGCTGGCACCTCAGCCTCCCTGGCCATCAGTGGGCTCCGGTCCGAGGATGAGGGTGATTATTACTG
TGCCTCGTGGGATGAAAGCCTGAATGGTGTGGTGTTCGGCGGAGGGACCAAGGTCACCGTCCTA
(SEQ ID NO: 206)

C. CDRs (Aminoacid sequences)
C.1- Binding to LBD (N1-EGF 1-13)

Heavy Chain

| Clone Name | HC-CDR1 | HC-CDR2 | HC-CDR3 |
|---|---|---|---|
| hN1S3-009 | GYNFTGYY (SEQ ID | INPNSGG (SEQ | ATDSFDY (SEQ ID NO: 209) |
| | NO: 207) | ID NO: 208) | |
| hN1S3-010 | GYNFTGYY (SEQ ID | INPNSGG (SEQ | ATDSFDY (SEQ ID NO: 209) |
| | NO: 207) | ID NO: 208) | |
| hN1S3-011 | GYNFTGYY (SEQ ID | INPNSGG (SEQ | ATDSFDY (SEQ ID NO: 209) |
| | NO: 207) | ID NO: 208) | |
| hN1S3-013 | GYNFTGYY (SEQ ID | INPNSGG (SEQ | ATDSFDY (SEQ ID NO: 209) |
| | NO: 207) | ID NO: 208) | |
| hN1S3-050 | GYNFTGYY (SEQ ID | INPNSGG (SEQ | ATDSFDY (SEQ ID NO: 209) |
| | NO: 207) | ID NO: 208) | |
| hN1S3-052 | GFTFTSYF (SEQ ID | INPSRGN (SEQ | ARDRLGGLLDYYDSSDSSKNFDAFDF |
| | NO: 210) | ID NO: 211) | (SEQ ID NO: 212) |
| hN1S3-056 | GYNFTGYY (SEQ ID | INPNSGG (SEQ | ATDSFDY (SEQ ID NO: 209) |
| | NO: 207) | ID NO: 208) | |
| hN1S3-094 | GYNFTGYY (SEQ ID | INPNSGG (SEQ | ATDSFDY (SEQ ID NO: 209) |
| | NO: 207) | ID NO: 208) | |
| hN1S3-113 | GYNFTGYY (SEQ ID | INPNSGG (SEQ | ATDSFDY (SEQ ID NO: 209) |
| | NO: 207) | ID NO: 208) | |
| hN1S3-126 | GYNFTGYY (SEQ ID | INPNSGG (SEQ | ATDSFDY (SEQ ID NO: 209) |
| | NO: 207) | ID NO: 208) | |
| hN1S3-146 | GFTFTSSA (SEQ ID | IVVGSGN (SEQ | VADTVY (SEQ ID NO: 215) |
| | NO: 213) | ID NO: 214) | |
| hN1S3-174 | GYNFTGYY (SEQ ID | INPNSGG (SEQ | ATDSFDY (SEQ ID NO: 209) |
| | NO: 207) | ID NO: 208) | |
| N1wc97 | GYNFTGYY (SEQ ID | INPNSGG (SEQ | ATDSFDY (SEQ ID NO: 209) |
| | NO: 207) | ID NO: 208) | |
| N1wc613 | GYNFTGYY (SEQ ID | INPNSGG (SEQ | ATDSFDY (SEQ ID NO: 209) |
| | NO: 207) | ID NO: 208) | |
| N1wc133 | GYNFTGYY (SEQ ID | INPNSGG (SEQ | ATDSFDY (SEQ ID NO: 209) |
| | NO: 207) | ID NO: 208) | |
| N1wc155 | GYNFTGYY (SEQ ID | INPNSGG (SEQ | ATDSFDY (SEQ ID NO: 209) |
| | NO: 207) | ID NO: 208) | |
| N1wc159 | GFTFSSYS (SEQ ID | ISSSGSS (SEQ | TRGTQWLAGVGDY |
| | NO: 216) | ID NO: 217) | (SEQ ID NO: 218) |
| N1wc168 | GYNFTGYY (SEQ ID | INPNSGG (SEQ | ATDSFDY (SEQ ID NO: 209) |
| | NO: 207) | ID NO: 208) | |
| N1wc173 | GYNFTGYY (SEQ ID | INPNSGG (SEQ | ATDSFDY (SEQ ID NO: 209) |
| | NO: 207) | ID NO: 208) | |
| N1wc49 | GYSFNKYY (SEQ ID | INPGSGT (SEQ | ARSNYDILAGYGPDAFDI (SEQ ID |
| | NO: 219) | ID NO: 220) | NO: 221) |

Light Chain

| Clone Name | LC-CDR1 | LC-CDR2 | LC-CDR3 |
|---|---|---|---|
| hN1S3-009 | SSNIGNNA (SEQ | YD | AAWDDSLNGVV (SEQ |
| | ID NO: 222) | | ID NO: 223) |
| hN1S3-010 | NSNIGSNY (SEQ | NN | AAWDDSLSGVV (SEQ |
| | ID NO: 224) | | ID NO: 225) |
| hN1S3-011 | SSNIGSNT (SEQ | SN | AAWDDSLNGVV (SEQ |
| | ID NO: 226) | | ID NO: 227) |
| hN1S3-013 | SSNIGSNY (SEQ | TN | AAWDDSLSGVV (SEQ |
| | ID NO: 228) | | ID NO: 225) |
| hN1S3-050 | SSNIGSNF (SEQ | RN | ATWDDNLSGVV (SEQ |
| | ID NO: 229) | | ID NO: 230) |
| hN1S3-052 | SSNIGRHT (SEQ | SS | AAWDASLKNWV (SEQ |
| | ID NO: 231) | | ID NO: 232) |
| hN1S3-056 | SSNIGSNT (SEQ | SN | AAWDDSLNGLV (SEQ ID |
| | ID NO: 226) | | NO: 233) |
| hN1S3-094 | SSNIGSNT (SEQ | IS | AAWDDSLNGAV (SEQ |
| | ID NO: 226) | | ID NO: 234) |
| hN1S3-113 | SPNIGSNT (SEQ | TN | AAWDDSLLGVV (SEQ ID |
| | ID NO: 235) | | NO: 236) |
| hN1S3-126 | ISNIGDNT (SEQ | SD | ASWDDSLDGVF (SEQ |
| | ID NO: 237) | | ID NO: 238) |
| hN1S3-146 | SSNIGKNA (SEQ | YD | AAWDDSLSGWV (SEQ |
| | ID NO: 239) | | ID NO: 240) |
| hN1S3-174 | SSNIGAGYD | GN | QSYDSSLTGSI (SEQ ID |
| | (SEQ ID NO: 241) | | NO: 242) |
| N1wc97 | SSNIGAGYD | GN | QSYDSSLSGSL (SEQ ID |
| | (SEQ ID NO: 241) | | NO: 243) |
| N1wc613 | YSNIGSNY (SEQ | TN | AAWDDSVSVLL (SEQ ID |
| | ID NO: 244) | | NO: 245) |
| N1wc133 | NSNIGSNT (SEQ | SN | AAWDDSLNGLI (SEQ ID |
| | ID NO: 246) | | NO: 247) |
| N1wc155 | SSNIGAGYD | GN | QSYDSSLSGSV (SEQ ID |
| | (SEQ ID NO: 241) | | NO: 248) |
| N1wc159 | SSDVGAYDS | DV | SSYRNTKTVV (SEQ ID |
| | (SEQ ID NO: 249) | | NO: 250) |
| N1wc168 | SSNIGSNI (SEQ | SN | AAWDDSLNGVV (SEQ |
| | ID NO: 251) | | ID NO: 227) |
| N1wc173 | SSNIGSNT (SEQ | SN | AAWDDSLNGVV (SEQ |
| | ID NO: 226) | | ID NO: 227) |
| N1wc49 | SSNIGSSVD | DN | QSYDSSLSSEV (SEQ ID |
| | (SEQ ID NO: 252) | | NO: 253) |

C.2- Binding to NRR
Heavy Chain

| Clone Name | HC-CDR1 | HC-CDR2 | HC-CDR3 |
|---|---|---|---|
| N1wc104 | GVSLATNNW | IYHSGY (SEQ ID | ARRYCDNGVCYPFDH (SEQ ID |
| | (SEQ ID NO: 254) | NO: 255) | NO: 256) |
| N1wc629 | GGTLSSYT (SEQ | IIPILDR (SEQ ID | ARSIGAAGDGVWFDP (SEQ ID |
| | ID NO: 257) | NO: 258) | NO: 259) |
| N1wc75 | GFTFDDYA (SEQ | ISWHSRT (SEQ | AKASYLSTSSSLDY (SEQ ID |
| | ID NO: 260) | ID NO: 261) | NO: 262) |

Light Chain

| Clone Name | LC-CDR1 | LC-CDR2 | LC-CDR3 |
|---|---|---|---|
| N1wc104 | SFNIGRYP (SEQ ID | YN | STWDDTLKGWV |
| | NO: 263) | | (SEQ ID NO: 264) |
| N1wc629 | SSNIGAGYD (SEQ ID | DN | QSYDNNLSGRV |
| | NO: 241) | | (SEQ ID NO: 265) |
| N1wc75 | SSDVGGYNY (SEQ | EG | SSYTTRSTRV (SEQ |
| | ID NO: 266) | | ID NO: 267) |

C.3- Additional Notch Antibodies
Heavy Chain

| Clone Name | HC-CDR1 | HC-CDR2 | HC-CDR3 |
|---|---|---|---|
| hN1S3-067 | GFTFTSYF | INPSRGN | ARDRLGGLLDYYDSSDSSKNFDAFDF |
| | (SEQ ID | (SEQ ID | (SEQ ID NO: 212) |
| | NO: 210) | NO: 211) | |
| hN1S3-116 | GYTFTDYY | INPNSGG | ARGAYDYVWGSHRYSGDAFDF (SEQ |
| | (SEQ ID | (SEQ ID | ID NO: 269) |
| | NO: 268) | NO: 208) | |
| hN1S3-073 | GFTFTSYF | INPSRGN | ARDRLGGLLDYYDSSDSSKNFDAFDF |
| | (SEQ ID | (SEQ ID | (SEQ ID NO: 212) |
| | NO: 210) | NO: 211) | |
| hN1S3-193 | GYNFTGYY | INPNSGG | ATDSFDY (SEQ ID NO: 209) |
| | (SEQ ID | (SEQ ID | |
| | NO: 207) | NO: 208) | |
| N1wc520 | GYNFTGYY | INPNSGG | ATDSFDY (SEQ ID NO: 209) |
| | (SEQ ID | (SEQ ID | |
| | NO: 207) | NO: 208) | |
| N1wc625 | GYNFTGYY | INPNSGG | ATDSFDY (SEQ ID NO: 209) |
| | (SEQ ID | (SEQ ID | |
| | NO: 207) | NO: 208) | |
| N1wc103 | GYNFTGYY | INPNSGG | ATDSFDY (SEQ ID NO: 209) |
| | (SEQ ID | (SEQ ID | |
| | NO: 207) | NO: 208) | |
| N1wc106 | GYSFSRYY | INPGGGT | ARSNYDILAGYGPDAFDF (SEQ ID |
| | (SEQ ID | (SEQ ID | NO: 272) |
| | NO: 270) | NO: 271) | |
| N1wc110 | GYNFTGYY | INPNSGG | ATDSFDY (SEQ ID NO: 209) |
| | (SEQ ID | (SEQ ID | |
| | NO: 207) | NO: 208) | |
| N1wc112 | GFTFGDYA | ISGSGSG | AKDQTDVTIRDFDY |
| | (SEQ ID | (SEQ ID | (SEQ ID NO: 275) |
| | NO: 273) | NO: 274) | |
| N1wc137 | GYTFTNYG | ISGYNDN | AFSYYDSSGYFN |
| | (SEQ ID | (SEQ ID | (SEQ ID NO: 278) |
| | NO: 276) | NO: 277) | |
| N1wc140 | GGTFSNYA | IIPIFGG (SEQ | ASGAYYDVMGNYPYSGMDV |
| | (SEQ ID | ID NO: 280) | (SEQ ID NO: 281) |
| | NO: 279) | | |
| N1wc142 | GYSFSRYY | INPGGGT | ARSNYDILAGYGPDAFDF (SEQ ID |
| | (SEQ ID | (SEQ ID | NO: 272) |
| | NO: 270) | NO: 271) | |
| N1wc145 | GYTFTTYG | ISTYNGN (SEQ | ARDARKAFDI (SEQ ID NO: 284) |
| | (SEQ ID | ID NO: 283) | |
| | NO: 282) | | |
| N1wc152 | GFTFSSHW | INEGGSA | VRDQFHSNYD (SEQ ID NO: 287) |
| | (SEQ ID | (SEQ ID | |
| | NO: 285) | NO: 286) | |
| N1wc157 | GYIFSQYP | VDTGNGT | ATNAFDY (SEQ ID NO: 290) |
| | (SEQ ID | (SEQ ID | |
| | NO: 288) | NO: 289) | |
| N1wc158 | GYNFTGYY | INPNSGG | ATDSFDY (SEQ ID NO: 209) |
| | (SEQ ID | (SEQ ID | |
| | NO: 207) | NO: 208) | |
| N1wc160 | GYNFTGYY | INPNSGG | ATDSFDY (SEQ ID NO: 209) |
| | (SEQ ID | (SEQ ID | |
| | NO: 207) | NO: 208) | |
| N1wc175 | GYNFTGYY | INPNSGG | ATDSFDY (SEQ ID NO: 209) |
| | (SEQ ID | (SEQ ID | |
| | NO: 207) | NO: 208) | |
| N1wc191 | GYNFTGYY | INPNSGG | ATDSFDY (SEQ ID NO: 209) |
| | (SEQ ID | (SEQ ID | |
| | NO: 207) | NO: 208) | |
| N1wc99 | GYTFTSYG | ISAYNGN (SEQ | ARLASRAFDI (SEQ ID NO: 293) |
| | (SEQ ID | ID NO: 292) | |
| | NO: 291) | | |
| N1wc14 | GFTSDDYA | ITWNSGH | AKASYLSTSSSLDY |
| | (SEQ ID | (SEQ ID | (SEQ ID NO: 262) |
| | NO: 294) | NO: 295) | |
| N1wc179 | GYNFTGYY | INPNSGG | ATDSFDY (SEQ ID NO: 209) |
| | (SEQ ID | (SEQ ID | |
| | NO: 207) | NO: 208) | |
| N1wc23 | GYNFTGYY | INPNSGG | ATDSFDY (SEQ ID NO: 209) |
| | (SEQ ID | (SEQ ID | |
| | NO: 207) | NO: 208) | |
| N1wc33 | GFTFSDSW | IGIDGIT (SEQ | ARNVGWESRP |
| | (SEQ ID | ID NO: 297) | (SEQ ID NO: 298) |
| | NO: 296) | | |
| N1wc48 | GYTFTDYY | VDPEDGE | ATGPFRLDS (SEQ ID NO: 300) |
| | (SEQ ID | (SEQ ID | |
| | NO: 268) | NO: 299) | |
| N1wc60 | GYNFTGYY | INPNSGG | ATDSFDY (SEQ ID NO: 209) |
| | (SEQ ID | (SEQ ID | |
| | NO: 207) | NO: 208) | |
| N1wc202 | GYNFTGYY | INPNSGG | ATDSFDY (SEQ ID NO: 209) |
| | (SEQ ID | (SEQ ID | |
| | NO: 207) | NO: 208) | |

Light Chain

| Clone Name | LC-CDR1 | LC-CDR2 | LC-CDR3 |
|---|---|---|---|
| hN1S3-067 | SGSIASNY (SEQ | DD | QSYDRFDHVV (SEQ ID |
| | ID NO: 301) | | NO: 302) |
| hN1S3-116 | SSNIGSNT (SEQ | NN | ASWDDSLNGRV (SEQ |
| | ID NO: 226) | | ID NO: 303) |
| hN1S3-073 | QGINNY (SEQ ID | AA | QQYDSYPHT (SEQ ID |
| | NO: 304) | | NO: 305) |
| hN1S3-193 | SSNIGSNT (SEQ | SN | AAWDDSLNGYV (SEQ |
| | ID NO: 226) | | ID NO: 215) |
| N1wc520 | SSNIESNA (SEQ | SH | AAWDDSLSGYV (SEQ |
| | ID NO: 306) | | ID NO: 307) |
| N1wc625 | RSNIGTNY (SEQ | TT | ASWDESLNGVV (SEQ |
| | ID NO: 308) | | ID NO: 309) |
| N1wc103 | SSNIGSNP (SEQ | SN | AAWDDSLNGSSV (SEQ |
| | ID NO: 310) | | ID NO: 311) |
| N1wc106 | SSNIGADND | SN | QSYDSGLTREL (SEQ ID |
| | (SEQ ID NO: 312) | | NO: 313) |
| N1wc110 | SSNIGSNT (SEQ | NN | ATWDDSLIGLA (SEQ ID |
| | ID NO: 226) | | NO: 314) |
| N1wc112 | NLGRKS (SEQ ID | ED | YSTDSSGNHRV (SEQ ID |
| | NO: 315) | | NO: 316) |
| N1wc137 | SSNIGTGYA | GN | QSFDTLSGSRV (SEQ ID |
| | (SEQ ID NO: 317) | | NO: 318) |
| N1wc140 | KIETKS (SEQ ID | ED | YSTDATGTERV (SEQ ID |
| | NO: 319) | | NO: 320) |
| N1wc142 | NSNIGAGHD | DN | QSYDSSLGEV (SEQ ID |
| | (SEQ ID NO: 321) | | NO: 322) |
| N1wc145 | SSDVGGYNY | EG | SSYTTRSTRV (SEQ ID |
| | (SEQ ID NO: 266) | | NO: 323) |
| N1wc152 | SSNIGAPFD | GN | QSYDSSLSGWV (SEQ |
| | (SEQ ID NO: 324) | | ID NO: 325) |
| N1wc157 | ALPDKY (SEQ ID | DD | YSTDSSGNERV (SEQ ID |
| | NO: 326) | | NO: 327) |
| N1wc158 | SSNIGSNS (SEQ | RN | AAWDDSLSGLV (SEQ ID |
| | ID NO: 328) | | NO: 329) |
| N1wc160 | SSNIGSNT (SEQ | TN | ASWDDSLKAYV (SEQ ID |
| | ID NO: 226) | | NO: 330) |
| N1wc175 | RSSIGSNT (SEQ | TN | ASWDDSLNDYV (SEQ |
| | ID NO: 331) | | ID NO: 332) |
| N1wc191 | SSNIGSNI (SEQ | TS | AAWDDSLNAVV (SEQ ID |
| | ID NO: 251) | | NO: 333) |
| N1wc99 | SSDVGGYNY | EG | SSYTTRSTRV (SEQ ID |
| | (SEQ ID NO: 266) | | NO: 267) |
| N1wc14 | NIGSKS (SEQ ID | ED | YSTDSSGNHRV (SEQ ID |
| | NO: 334) | | NO: 316) |
| N1wc179 | SSNIGSNT (SEQ | ND | AAWDDSLNGLA (SEQ ID |
| | ID NO: 226) | | NO: 335) |
| N1wc23 | YSNIGSNY (SEQ | TN | AAWDDSVGVLL (SEQ ID |
| | ID NO: 244) | | NO: 336) |
| N1wc33 | DSNIGRNT (SEQ | TN | AAWDDSLNAYF (SEQ ID |
| | ID NO: 337) | | NO: 338) |
| N1wc48 | SSNIGAGYD | GN | QSFDNRLSDFNV (SEQ |
| | (SEQ ID NO: 241) | | ID NO: 339) |
| N1wc60 | SSNIGSNY (SEQ | RN | AAWDDSLSGLV (SEQ ID |
| | ID NO: 228) | | NO: 329) |
| N1wc202 | SSNIESNA (SEQ | SH | AAWDDSLSGYV (SEQ |
| | ID NO: 306) | | ID NO: 307) |

APPENDIX IV
Group II - Notch1/Notch3 antibodies

A. Aminoacid sequence
Heavy Chain

| Clone Name | HC-sequences |
|---|---|
| hN1S3- | EVQLVQSGAEVKKPGASVKVSCKASGYNFTGYYMHWVRQAPGQGLEWMGWIN |
| 001 | PNSGGTNYAQKFQGRVTMTRDTSISTAYMELSRLRSDDTAVYYCATDSFDYWGQ |
| | GTMVTVSS (SEQ ID NO: 340) |
| hN1S3- | EVQLVQSGPEVKKPGTSVKVSCKASGFTFTNSAVQWVRQARGQRLEWIGWIVVG |
| 003 | SGNTNYAQKFQERVTITRDMSTSTAYMELSSLKSEDTAVYYCVADTVYWGQGTLV |
| | TVSS (SEQ ID NO: 341) |
| hN1S3- | QVQLVQSGAEVKKPGASVKVSCKASGYNFTGYYMHWVRQAPGQGLEWMGWIN |
| 007 | PNSGGTNYAQKFQGRVTMTRDTSISTAYMELSRLRSDDTAVYYCATDSFDYWGQ |
| | GTMVTVSS (SEQ ID NO: 342) |
| hN1S3- | EVQLVQSGAEVKKPGASVKVSCKASGYNFTGYYMHWVRQAPGQGLEWMGWIN |
| 023 | PNSGGTNYAQKFQGRVTMTRDTSISTAYMELSRLRSDDTAVYYCATDSFDYWGQ |
| | GTMVTVSS (SEQ ID NO: 343) |
| hN1S3- | EVQLVQSGAEVKKPGASVKVSCKASGYNFTGYYMHWVRQAPGQGLEWMGWIN |
| 032 | PNSGGTNYAQKFQGRVTMTRDTSISTAYMELSRLRSDDTAVYYCATDSFDYWGK |
| | GTLVTVSS (SEQ ID NO: 344) |
| hN1S3- | QVQLVQSGAEVKKPGASVKVSCKASGYNFTGYYMHWVRQAPGQGLEWMGWIN |
| 035 | PNSGGTNYAQKFQGRVTMTRDTSISTAYMELSRLRSDDTAVYYCATDSFDYWGQ |
| | GTLVTVSR (SEQ ID NO: 345) |
| hN1S3- | EVQLVQSGPEVKKPGTSVKVSCKASGFTFTSSAVQWVRQARGQRLEWIGWIVVG |
| 040 | SGNTNYAQKFQERVTITRDMSTSTAYMELSSLRSEDTAVYYCVADTVYWGRGTTV |
| | TVSS (SEQ ID NO: 346) |
| hN1S3- | EVQLVQSGAEVKKPGASVKVSCKASGYNFTGYYMHWVRQAPGQGLEWMGWIN |
| 053 | PNSGGTNYAQKFQGRVTMTRDTSISTAYMELSRLRSDDTAVYYCATDSFDYWGR |
| | GTTVTVSS (SEQ ID NO: 347) |
| hN1S3- | QVQLVQSGAEVKKPGASVKVSCKASGYNFTGYYMHWVRQAPGQGPEWMGWIN |
| 055 | PNSGGTNYAQKFQGRVTMTRDTSISTAYMELSRLRSDDTAVYYCATDSFDYWGR |
| | GTMVTVSS (SEQ ID NO: 348) |
| hN1S3- | QVQLVQSGPEVKKPGTSVKVSCKASGFTFTSSAVQWVRQARGQRLEWIGWIVVG |
| 147 | SGNTNYAQKFQERVTITRDMSTSTAYMELSSLRSEDTAVYYCVADTVYWGKGTLV |
| | TVSS (SEQ ID NO: 349) |
| hN1S3- | QVQLVQSGPEVKKPGTSVKVSCKASGFTFTSSAVQWVRQARGQRLEWIGWIVVG |
| 082 | SGNTNYAQKFQERVTITRDMSTSTAYMELSSLRSEDTAVYYCVADTVYWGRGTLV |
| | TVSS (SEQ ID NO: 350) |
| hN1S3- | EVQLLESGGGLVQPGGSLRLSCAASGFTFSSYAMSWVRQAPGKGLEWVSAISGS |
| 088 | GGSTYYADSVKGRFTISRDNSKNTLYLQMNSLRAEDTAVYYCATEPPFDIWGRGT |
| | MVTVSS (SEQ ID NO: 351) |
| hN1S3- | EVQLVQSGAEVKKPGASVKVSCKASGYNFTGYYMHWVRQAPGQGLEWMGWIN |
| 096 | PNSGGTNYAQKFQGRVTMTRDTSISTAYMELSRLRSDDTAVYYCATDSFDYWGR |
| | GTTVTVSS (SEQ ID NO: 352) |
| hN1S3- | QVQLVQSGAEVKKPGASVKVSCKASGYNFTGYYMHWVRQAPGQGLEWMGWIN |
| 112 | PNSGGTNYAQKFQGRVTMTRDTSISTAYMELSRLRSDDTAVYYCATDSFDYWGR |
| | GTLVTVSS (SEQ ID NO: 353) |
| hN1S3- | EVQLVQSGAEVKKPGASVKVSCKASGYNFTGYYMHWVRQAPGQGLEWMGWIN |
| 124 | PNSGGTNYAQKFQGRVTMTRDTSISTAYMELSRLRSDDTAVYYCATDSFDYWGR |
| | GTTVTVSS (SEQ ID NO: 354) |
| hN1S3- | EVQLVQSGAEVKKPGASVKVSCKASGYNFTGYYMHWVRQAPGQGLEWMGWIN |
| 127 | PNSGGTNYAQKFQGRVTMTRDTSISTAYMELSRLRSDDTAVYYCATDSFDYWGQ |
| | GTLVTVSS (SEQ ID NO: 355) |
| hN1S3- | QVQLQESGAEVKKPGASVKVSCKASGYNFTGYYMHWVRQAPGQGLEWMGWIN |
| 136 | PNSGGTNYAQKFQGRVTMTRDTSISTAYMELSRLRSDDTAVYYCATDSFDYWGR |
| | GTTVTVSS (SEQ ID NO: 356) |
| hN1S3- | EVQLVQSGAEVKKPGASVKVSCKASGYNFTGYYMHWVRQAPGQGLEWMGWIN |
| 177 | PNSGGANYAQKFQGRVTMTRDTSISTAYMELSRLRSDDTAVYYCATDSFDYWGR |
| | GTLVTVSS (SEQ ID NO: 357) |
| hN1S3- | QVQLVQSGAEVKKPGASVKVSCKASGYNFTGYYMHWVRQAPGQGLEWMGWIN |
| 181 | PNSGGTNYAQKFQGRVTMTRDTSISTAYMELSRLRSDDTAVYYCATDSFDYWGR |
| | GTLVTVSS (SEQ ID NO: 358) |
| hN1S3- | QVQLVQSGAEVKKPGASVKVSCKASGYNFTGYYMHWVRQAPGQGLEWMGWIN |
| 182 | PNSGGTNYAQKFQGRVTMTRDTSISTAYMELSRLRSDDTAVYYCATDSFDYWGR |
| | GTMVTVSS (SEQ ID NO: 359) |
| hN1S3- | QVQLVQSGAEVKKPGASVKVSCKASGYNFTGYYMHWVRQAPGQGLEWMGWIN |
| 184 | PNSGGTNYAQKFQGRVTMTRDTSISTAYMELSRLRSDDTAVYYCATDSFDYWGR |
| | GTTVTVSS (SEQ ID NO: 360) |
| hN1S3- | QVQLVQSGAEVKKPGASVKVSCKASGYNFTGYYMHWVRQAPGQGLEWMGWIN |
| 191 | PNSGGTNYAQKFQGRVTMTRDTSISTAYMELSRLRSDDTAVYYCATDSFDYWGR |
| | GTLVTVSS (SEQ ID NO: 361) |
| hN1S3- | GVQLVQSGAEVKKPGASVKVSCKASGYTFTDYYVHWVRQAPGQGPEWMGWINP |
| 002 | NNGGTKYAQKFQGRVTMTTDTSTSTAYMELRSLRSDDTALYYCARDLLPYYGDY |
| | RADKIDDFDIWGRGTLVTVSS (SEQ ID NO: 362) |
| hN1S3- | QVQLVQSGAEVKKPGASVKVSCKASGYNFTGYYIHWVRQAPGQGLEWMGWINP |
| 006 | NSGGTNYAQKFQGRVIMTRDTSISTAYMELSRLRSDDTAVYYCATDSFDYWGRG |
| | TLVTVSS (SEQ ID NO: 363) |
| hN1S3- | QVQLVQSGAEVKKPGASVKVSCKASGYNFTGYYMHWVRQAPGQGLEWMGWIN |
| 030 | PNSGGTNYAQKFQGRVTMTRDTSISTAYMELSRLRSDDTAVYYCATDSFDYWGQ |
| | GTMVTVSS (SEQ ID NO: 364) |
| hN1S3- | EVQLVQSGAEVKKPGASVKVSCKASGYNFTGYYMHWVRQAPGQGLEWMGWIN |
| 036 | PNSGGTNYAQKFQGRVTMTRDTSISTAYMELSRLRSDDTAVYYCATDSFDYWGR |
| | GTMVTVSS (SEQ ID NO: 365) |
| hN1S3- | EVQLVQSGAEVKKPGASVKVSCKASGYNFTGYYMHWVRQAPGQGLEWMGWIN |
| 038 | PNSGGTNYAQKFQGRVIMTRDTSISTAYMELSRLTSDDTAVYYCATDSFDYWGRG |
| | TTVTVSR (SEQ ID NO: 366) |
| hN1S3- | EVQLVQSGAEVKKPGASVKVSCKASGYNFTGYYMHWVRQAPGQGLEWMGWIN |
| 074 | PNSGGTNYAQKFQGRVTMTRDTSISTAYMELSRLRSDDTAVYYCATDSFDYWGR |
| | GTMVTVSS (SEQ ID NO: 367) |
| hN1S3- | EVQLVQSGAEVKKPGAPVKVSCKTSGYGFSNYYMHWVRQAPGQGLEWLGMINP |
| 077 | SDGSQHFAQRFRDRVSFTSDTSTSAVYMELAGLRSDDTAVYYCAREKANSMYFD |
| | YWGQGTLVTVSS (SEQ ID NO: 368) |
| hN1S3- | QVQLQQSGPGLVKPSQTLSLTCAISGDSISSSSATWNWIRQSPSRGLEWLGRTYY |
| 083 | RSKWYNDYAVSVKSRITIDPDTSKNQFSLQLNSVTPEDTAVYYCARQLGGRIEFW |
| | GQGTLVTVSS (SEQ ID NO: 369) |
| hN1S3- | QVQLVQSGAEVKKPGASVRISCKTSGFTFTSYFIHWVRQAPGQRPEWMGVINPS |
| 087 | RGNADYAPRFRGRVTMTRDKSTHTVYMDLKSLRSDDAAIYYCARDRLGGLLDYY |
| | DSSDSSKNFDAFDFWGQGTLVTVSS (SEQ ID NO: 370) |
| hN1S3- | EVQLVQSGAEVKKPGASVKVSCKASGYNFTGYYMHWVRQAPGQGLEWMGWIN |
| 091 | PNSGGTNYAQKFQGRVTMTRDTSISTAYMELSRLRSDDTAVYYCATDSFDYWGQ |
| | GTMVTVSS (SEQ ID NO: 371) |
| hN1S3- | EVQLVQSGAEVKKPGASVKVSCKASGYNFTGYYMHWVRQAPGQGLEWMGWIN |
| 092 | PNSGGTNYAQKFQGRVTMTRDTSISTAYMELSRLRSDDTAVYYCATDSFDYWGQ |
| | GTLVTVSS (SEQ ID NO: 372) |
| hN1S3- | EVQLVQSGAEVKKPGASVKVSCKASGYNFTGYYMHWVRQAPGRGLEWMGWINP |
| 095 | NSGGTNYAQKFQGRVTMTRDTSISTAYMELSRLRSDDTAVYYCATDSFDYWGQG |
| | TLVTVSS (SEQ ID NO: 373) |
| hN1S3- | EVQLVQSGPEVKKPGASVKVSCKASGYTFTDYFLNWVRQAPGQGLEWIGWINPN |
| 107 | TGGTNYAQNFQGRVTVTRDASISTAYMELRSLTSADTAIYYCARGAYDYVWGSHR |
| | YVADAFDIWGQGTLVTVSS (SEQ ID NO: 374) |
| hN1S3- | QVQLVQSGPEVKKPGTSVKVSCKASGFTFTSSAVQWVRQARGQRLEWIGWIVVG |
| 133 | SGNTNYAQKFQERVTITRDMSTSTAYMELSSLRSEDTAVYYCVADTVYWGQGTLV |
| | TVSS (SEQ ID NO: 375) |
| hN1S3- | EVQLVQSGAEVKKPGASVKVSCKASGYNFTGYYMHWVRQAPGQGLEWMGWIN |
| 135 | PNSGGTNYAQKFQGRVTMTRDTSISTAYMELSRLRSDDTAVYYCATDSFDYWGK |
| | GTLVTVSS (SEQ ID NO: 376) |
| hN1S3- | QVQLVQSGAEVKKPGASVKVSCKASGYNFTGYYIHWVRQAPGQGLEWMGWINP |
| 141 | NSGGTNYAQKFQGRVIMTRDTSISTAYMELSRLRSDDTAVYYCATDSFDYWGRG |
| | TLVTVSS (SEQ ID NO: 377) |
| hN1S3- | QVQLVQSGAEVKKPGASVKVSCKASGYNFTGYYMHWVRQAPGQGLEWMGWIN |
| 151 | PNSGGTNYAQKFQGRVTMTRDTSISTAYMELSRLRSDDTAVYYCATDSFDYWGR |
| | GTLVTVSS (SEQ ID NO: 378) |
| hN1S3- | QVQLQESGGGLVQPGGSLSLSCATSGFTFGNYVMRWVRQAPGKGLEWVSTITE |
| 153 | GGGDFIYYADSVKGRFAISRDNSKSTVYLHMNGLRVEDTAVYYCAKSGGDDNSNY |
| | NFEYWGQGTLVTVSS (SEQ ID NO: 379) |
| hN1S3- | QVQLVQSGAEVKKPGASVRISCKTSGFTFTSYFIHWVRQAPGQRPEWMGVINPS |
| 190 | RGNADYAPRFRGRVTMTRDKSTHTVYMDLKSLRSDDAAIYYCARDRLGGLLDYY |
| | DSSDSSKNFDAFDFWGQGTLVTVSS (SEQ ID NO: 380) |
| hN1S3- | QVQLVQSGAEVRKPGASVKVSCKASGYTFTDYYLHWVRQAPGLGLEWMGWINP |
| 108 | NTGGTDYGQKFQGRVTMTRDTSINTAYMELSSLRSDDTAVYYCARGAYDYVWGS |
| | HRYVADAFDIWGQGTTVTVSS (SEQ ID NO: 381) |
| hN1S3- | KVQLVQSGAEVKKPGASVKVSCKASGYTFTDFYIHWVRQAPGQGLEWMGWINSK |
| 130 | SGDTHYAQKFQGRVTLTRDTSTDTAYMELSRLTSDDTAVYYCARGAYDYVWGSS |
| | RYVADAFDIWGRGTMVTVSS (SEQ ID NO: 382) |
| N1wc11 | EVQLVQSGPEVKKPGTSVKVSCKASGFTFTNSAVQWVRQARGQRLEWIGWIVVG |
| | SGNINYAQKFQERVTITRDMSTSTAYMELSSLKSEDTAVYYCVADTVYWGRGTMV |
| | TVSS (SEQ ID NO: 383) |
| N1wc13 | QVQLVQSGAEVKKPGASVKVSCKASGYNFTGYYMHWVRQAPGQGLEWMGWIN |
| | PNSGGTNYAQKFQGRVTMTRETSISTAYMELSRLRSDDTAVYYCATDSFDYWGR |
| | GTMVTVSS (SEQ ID NO: 384) |
| N1wc15 | QVQLQQSGAEVKKPGASVKVSCKASGYNFTGYYMHWVRQAPGQGLEWMGWIN |
| | PNSGGTNYAQKFQGRVTMTRDTSISTAYMELSRLRSDDTAVYYCATDSFDYWGQ |
| | GTMVTVSS (SEQ ID NO: 385) |
| N1wc16 | QVQLQQSGAEVKTPGASVKVSCKASGYTFTDNYIHWVRQAPGQGLEWMGRINV |
| | NSGATNYARKFQGRVTMTGDTSISTAYMDLSRLKSDDTAVYYCARDFRYSGVDV |
| | WGQGTMVTVSS (SEQ ID NO: 386) |
| N1wc21 | QVQLVESGAEVKKPGASVKVSCKASGYTFTDHYIQWLRQAPGQGLEWMGWMNP |
| | KSGGTNYAQKFQGRVTLTRDTSISTAYMDLSGLRFDDTAIYFCASDPTIPPSPNYD |
| | YYYYAMDLWGKGTLVTVSS (SEQ ID NO: 387) |
| N1wc24 | EVQLVESGPGLVKPSETLSLTCTVSGGSMTSNFWSWIRQTPGKGLEWIGYVLYTG |
| | STNSNPSLKSRVTMSVDTSKNQVSLTLSSVTAADTAIYYCARGNGWYLPWGRGT |
| | MVTVSS (SEQ ID NO: 388) |
| N1wc72 | EVQLVQSGAEVKKPGASVKVSCKASGYNFTGYYMHWVRQAPGQGLEWMGWIN |
| | PNSGGTNYAQKFQGRVTMTRDTSISTAYMELSRLRSDDTAVYYCATDSFDYWGK |
| | GTMVTVSS (SEQ ID NO: 389) |
| N1wc79 | QVQLQQSGAEVKKPGASVKVSCKASGYNFTGYYMHWVRQAPGQGLEWMGWIN |
| | PNSGGTNYAQKFQGRVTMTRDTSISTAYMELSRLRSDDTAVYYCATDSFDYWGQ |
| | GTMVTVSS (SEQ ID NO: 390) |
| N1wc82 | QVQLVQSGAEVKKPGASVKVSCKASGYNFTGYYMHWVRQAPGQGLEWMGWIN |
| | PNSGGTNYAQKFQGRVTMTRDTSISTAYMELSRLRSDDTAVYYCATDSFDYWGK |
| | GTLVTVSS (SEQ ID NO: 391) |
| N1wc102 | QVQLVQSGAEVKKPGAPVKVSCKASGYNFTGYYMHWVRQAPGQGLEWMGWIN |
| | PNSGGTNYAQKFQGRVAMTRDTSISTAYMELSRLRSDDTAVYYCATDSFDYWGQ |
| | GTMVTVSS (SEQ ID NO: 392) |
| N1wc113 | QMQLVQSGAEVKRPGASVNLSCKASGYSFSRYYIHWVRQAPGQGLELMGRINPG |
| | GGTTTYAQKFQGRVTLSRDTSTNTIFMELNGLTSEDTAMYYCARSNYDILAGYGP |
| | DAFDFWGQGTMVTVSS (SEQ ID NO: 393) |
| N1wc117 | QVQLVQSGAEVKKPGASVKVSCKASGYNFTGYYMHWVRQAPGQGLEWMGWIN |
| | PNSGGTNYAQKFQGRVTMTRDTSISTAYMELSRLRSDDTAVYYCATDSFDYWGR |
| | GTLVTVSS (SEQ ID NO: 394) |
| N1wc125 | QVQLQQSGAEVKKPGAPLKVSCKTSGFTFTGYYIHWVRQAPGQGLEWMGRVDP |
| | YNGATNFAQKFQGRVTMTTDTSTSTTYMELMSLRSDDTAVYYCARGWELDSWG |
| | QGTLVTVSS (SEQ ID NO: 395) |
| N1wc127 | QVQLVQSGAEVKKPGASVKVSCKASGYNFTGYYMHWVRQAPGQGLEWMGWIN |
| | PNSGGTNYAQKFQGRVTMTRDTSISTAYMELSRLRSDDTAVYYCATDSFDYWGR |
| | GTLVTVSS (SEQ ID NO: 396) |
| N1wc129 | QVQLVQSGAEVKKPGASVKVSCKASGYNFTGYYLHWVRQAPGQGLEWMGWIDP |
| | NSGGTDYAQQFQGRVTVTRDTSISTAYMELSGLRSDDTAVYYCASDSFDHWGQG |
| | TLVTVSS (SEQ ID NO: 397) |
| N1wc130 | QVQLQQSGAEVKKPGASVKVSCKASGYNFTGYYMHWVRQAPGQGLEWMGWIN |
| | PNSGGTNYAQKFQGRVTMTRDTSISTAYMELSRLRPDDTAVYYCATDSFDYWGK |
| | GTMVTVSS (SEQ ID NO: 398) |
| N1wc131 | EVQLVQSGAEAKKPGASVKVSCKASGYNFTGYYMHWVRQAPGQGLEWMGWIN |
| | PNSGGTNYAQKFQGRVTMTRDTSISTAYMELSRLRSDDTAVYYCATDSFDYWGQ |
| | GTLVTVSS (SEQ ID NO: 399) |
| N1wc132 | QVQLVQSGAEVKKPGASVKVSCKASGYNFTGYYLHWVRQAPGQGLEWMGWINP |
| | NSGGTDYAQKFQGRVTVTRDTSISTAYMELGGLRSDDTAVYYCVSDSFDHWGRG |
| | TLVTVSS (SEQ ID NO: 400) |
| N1wc135 | QVQLVQSGAEVKKPGASVKVSCKASGYNFTGYYMHWVRQAPGQGLEWMGWIN |
| | PNSGGTNYAQKFQGRVTMTRDTSISTAYMELSRLRSDDTAVYYCATDSFDYWGQ |
| | GTLVTVSS (SEQ ID NO: 401) |
| N1wc150 | EVQLVQSGAEVKKPGASVKVSCKASGYNFTGYYMHWVRQAPGQGLEWMGWIN |
| | PNSGGTNYAQKFQGRVTMTRDTSISTAYMELSRLRSDDTAVYYCATDSFDYWGR |
| | GTMVTVSS (SEQ ID NO: 402) |
| N1wc164 | QVQLVQSGADVKKPGASVKISCKASGYTFTKYYMHWVRQAPGQGLEWMGIINPT |
| | NGYTSYAQKFQGRVTMTSDTSASTVSMELSSLRSEDTAVYYCTRSYSNYDSFDIW |
| | GRGTMVTVSS (SEQ ID NO: 403) |
| N1wc170 | QVQLQQSGPEVKKPGASVKISCKTSGYTFSSFGISWVRQAPGQGPEWMGWVSP |
| | YSGDTDYAQKFRGRVTMTIDSSTDTAYVEMRSLRSDDTAIYYCANSPISDGSSSSY |
| | DNWGKGTLVTVSS (SEQ ID NO: 404) |
| N1wc177 | QVQLVQSGAEVKEPGSSVRVSCKSSGGTFSNYAISWVRQAPGQGLEWMGGIIPG |
| | FGKTNYAQKFQGRVTITADASTSTTYMELRTLRSGDTAVYYCARDRGPDIGVAHF |
| | DSWGKGTMVTVSS (SEQ ID NO: 405) |
| N1wc182 | QVQLVQSGPEVKKPGTSVKVSCKASGFTFTSSAVQWVRQARGQRLEWIGWIVVG |
| | SGNTNYAQKFQERVTITRDMSTSTAYMELSSLRSEDTAVYYCVADTVYWGQGTLV |
| | TVSS (SEQ ID NO: 406) |
| N1wc197 | EVQLVQSGAEVKKPGASVKVSCKASGYNFTGYYMHWVRQAPGQGLEWMGWIN |
| | PNSGGTNYAQKFQGRVTMTRDTSISTAYMELSRLRSDDTAVYYCATDSFDYWGR |
| | GTLVTVSS (SEQ ID NO: 407) |
| N1wc225 | QVQLQQSGAEVKKPGASVKVSCKASGYNFTGYYMHWVRQAPGQGLEWMGWIN |
| | PNSGGTNYAQKFQGRVTMTRDTSISTAYMELSRLRSDDTAVYYCATDSFDYWGR |
| | GTMVTVSS (SEQ ID NO: 408) |
| N1wc239 | EVQLVESGAEVKKPGASVKVSCKASGYNFTGYYIHWVRQAPGQGLEWMGWINP |
| | NSGGTNYAQKFQGRVIMTRDTSISTAYMELSRLRSDDTAVYYCATDSFDYWGKGT |
| | MVTVSS (SEQ ID NO: 409) |
| N1wc241 | EVQLVQSGAEVKKPGASVKVSCKTSGYTFNDYYHHWVRQAPGQGLEWMGWINP |
| | HTGVANYAEKYKGRLAMTGDTSISTIYMDLSSLISDDTAIYFCARERSEWRNTVSS |
| | PSEYFHHWGKGTLVTVSS (SEQ ID NO: 410) |
| N1wc248 | EVQLVQSGAEVKKPGASVKVSCKASGYNFTGYYMHWVRQAPGQGLEWMGWIN |
| | PNSGGTNYAQKFQGRVTMTRDTSISTAYMELSRLRSDDSAVYYCATDSFDYWGR |
| | GTLVTVSS (SEQ ID NO: 411) |
| N1wc266 | QVQLVQSGAEVKKPGASVKVSCKASGYNFTGYYMHWVRQAPGQGLEWMGWIN |
| | PNSGGTNYAQKFQGRVTMTRDTSISTAYMELSRLRSDDTAVYYCATDSFDYWGQ |
| | GTMVTVSS (SEQ ID NO: 412) |
| N1wc281 | QVQLQESGAEVKKPGASVKVSCRASGYTFTTNSLHWVRQAPGQGLDWMGVINP |
| | RDGSATVAQKFQGRITMTSDTSTSTVFLALSSLTSDDTGVYFCARDGLDYRDTSRI |
| | LAPTDVWGRGTLVTVSS (SEQ ID NO: 413) |
| N1wc289 | QVQLVQSGAEVKKPGTTVKISCKVSGYKFTDYYIHWVRQAPGKGLEWMGFVDPT |
| | DDETRFAEKFQGRLTMTADTSRDTASMELSSLRSEDTAVYYCIRGIAALADWGRG |
| | TMVTVSS (SEQ ID NO: 414) |
| N1wc295 | QVQLQQSGAEVKKPGASVKVSCKASGYNFTGYYMHWVRQAPGQGLEWMGWIN |
| | PNSGGTNYAQNFQGRVTMTRDTSISTAYMELSRLRSDDTAVYYCATDSFDYWGR |
| | GTMVTVSS (SEQ ID NO: 415) |
| N1wc301 | QVQLQQSGAEVKKPGASVKVSCKASGYIFGTYAIHWVRQAPGQSLEWMGWINAG |
| | TGNTKYSQKFQGRVTITMDTSATTAYMELSSLRSGDTAVYYCTRGDYYDSRGYYN |
| | RFDYWGRGTLVTVSS (SEQ ID NO: 416) |
| N1wc319 | QVQLVQSGAEVEKPGASVKVSCKASGYNFTGYYMHWVRQAPGQGLEWMGWIN |
| | PNSGGTNYAQKFQGRVTMTRDTSISTAYMELSRLRSDDTAVYYCATDSFDYWGR |
| | GTLVTVSS (SEQ ID NO: 417) |
| N1wc336 | QVQLVQSGAEVKRPGASVKVSCKASGYNFTGYYMHWVRQAPGQGLEWMGWIN |
| | PNSGGTNYAQKFQGRVTMTRDTSISTAYMELSRLRSDDTAVYYCATDSFDYWGK |
| | GTLVTVSS (SEQ ID NO: 418) |
| N1wc338 | QVQLVQSGAEVKKPGASVKVSCKASGYNFTGYYMHWVRQAPGQGLEWMGWIN |
| | PNSGGTNYAQKF*GRVTMTRDTSISTAYMELSRLRSDDTAVYYCATDSFDYWGKG |
| | TLVTVSS (SEQ ID NO: 419) |
| N1wc403 | EVQLVQSGAEVKKPGASVKVSCKASGYNFTGYYMHWVRQAPGQGLEWMGWIN |
| | PNSGGTNYAQKFQGRVTMTRDTSISTAYMELSRLRSDDTAVYYCATDSFDYWGR |
| | GTLVTVSS (SEQ ID NO: 420) |
| N1wc441 | QVQLVQSGAEVKKPGASVKVSCKAPGYSFTDYYLHWVRQAPGIGLEWVGWINPN |
| | NGGTNYAQKFRGRVTMTRDTAINTAYMDMRWLRSDDTAVYYCATDGPPGTGNA |
| | FDIWGRGTLVTVSS (SEQ ID NO: 421) |
| N1wc476 | EVQLVQSGAEVKKPGASVKVSCKASGYNFTGYYMHWVRQAPGQGLEWMGWIN |
| | PNSGGTNYAQKFQGRVTMTRDTSISTAYMELSRLRSDDTAVYYCATDSFDYWGQ |
| | GTLVTVSS (SEQ ID NO: 422) |
| N1wc516 | EVQLVESGAEVKKPGASVKVSCKASGYNFTGYYMHWVRQAPGQGLEWMGWINP |
| | NSGGTNYAQKFQGRVIMTRDTSISTAYMELSRLTSDDTAVYYCATDSFDYWGRGT |
| | LVTVSS (SEQ ID NO: 423) |
| N1wc535 | QVQLVQSGAEVKKPGASVKVSCKASGYNFTGYYMHWVRQAPGQGLEWMGWIN |
| | PNSGGTNYAQKFQGRVTMTRDTSISTAYMELSRLRSDDTAVYYCATDSFDYWGR |
| | GTLVTVSS (SEQ ID NO: 424) |
| N1wc540 | EVQLVQSGAEVKKPGASVKVSCKASGYNFTGYYMHWVRQAPGQGLEWMGWIN |
| | PNSGGTNYAQKFQGRVTMTRDTSISTAYMELSRLRSDDTAVYYCATDSFDYWGQ |
| | GTMVTVSS (SEQ ID NO: 425) |
| N1wc558 | QVQLVQSGAEVKKPGASVKVSCKASGYNFTGYYMHWVRQAPGQGLEWMGWIN |
| | PNSGGTNYAQKFQGRVTMTRDTSISTAYMELSRLRSDDTAVYYCATDSFDYWGR |
| | GTLVTVSS (SEQ ID NO: 426) |
| N1wc570 | QVQLVQSGPEVKKPGTSVKVSCKASGFTFTSSAVQWVRQARGQRLEWIGWIVVG |
| | SGNTNYAQKFQERVTITRDMSTSTAYMELSSLRSEDTAVYYCVADTVYWGRGTM |
| | VTVSS (SEQ ID NO: 427) |
| N1wc572 | QVQLVQSGAEVKKPGASVKVSCKASGYNFTGYYMHWVRQAPGQGLEWMGWIN |
| | PNSGGTNYAQKFQGRVTMTRDTSISTAYMELSRLRSDDTAVYYCATDSFDYWGR |
| | GTLVTVSS (SEQ ID NO: 428) |
| N1wc586 | QVQLVQSGPEVKKPGASVKVSCKAAGYTFPDFYMHWVRQAPGKGPEWVGWINS |
| | NSGSTRLAERLEGRVTLTRDTSISTAYMELTSLTSDDTAVYYCARGAYDYVWGTS |
| | RYVADAFDIWGQGTLVTVSP (SEQ ID NO: 429) |
| N1wc614 | EVQLVQSGAEVKKPGASVKVSCKASGYNFTGYYMHWVRQAPGQGLEWMGWIN |
| | PNSGGTNYAQKFQGRVTMTRDTSISTAYMELSRLRSDDTAVYYCATDSFDYWGQ |
| | GTLVTVSS (SEQ ID NO: 430) |
| N1wc621 | EVQLVQSGAEVKKPGASVKVSCKASGYTFTGYYIHWVRQAPGQGLEWMGWISP |
| | NSGVTNYAQRFQGRVTMSRDTSITTAYMELNRLGSDDTAVYYCAREGREDGVLF |
| | DYWGRGTLVTVSS (SEQ ID NO: 431) |
| N1wc624 | QVQLQQSGAEVKKPGASVKVSCKASGYNFTGYYMHWVRQAPGQGLEWMGWIN |
| | PNSGGTNYAQKFQGRVTMTRDTSISTAYMELSRLGSDDTAVYYCATDSFDYWGR |
| | GTLVTVSS (SEQ ID NO: 432) |
| N1wc633 | QVQLQQSGAEVKKPGASVKVSCKASGYNFTGYYMHWVRQAPGQGLEWMGWIN |
| | PNSGGTNYAQKFQGRVTMTRDTSISTAYMELSRLRSDDTAVYYCATDSFDYWGR |
| | GTLVTVSS (SEQ ID NO: 433) |
| N1wc45 | EVQLVQSGAEVKKPGASVKVSCKASGYSFRSYGIVWVRQAPGQGLEWMGWISA |
| | YNGNTNYAQKLQGRVTMTTDTSTSTAYMELRSLRSDDTAVYYCVRGDRHYDILTG |
| | YSPVWFDPWGKGTTVTVSS (SEQ ID NO: 434) |
| N1wc39 | EVQLVQSGAEVKKPGASVKLSCKTSGHTFTNYAFHWLRQAPGQRPEWLGWINAD |
| | NGNTKYSQSFQDRVTITRDISANTAYMEMSRLKSEDTAYYYCARDPWSGVLDHW |
| | GKGTLVTVSS (SEQ ID NO: 435) |

Light Chain

| Clone Name | LC amino acid sequences |
|---|---|
| hN1S3- | QSVVTQPPSASGTPGQRVTISCSGSSSNIGSNTVNWYQQLPGTAPKLLIYSNNQR |
| 001 | PSGVPDRFSGSKSGTSASLAISGLQSEDEADYYCAAWDDSLNGYVFGTGTKLTVL |
| | (SEQ ID NO: 436) |
| hN1S3- | QSVLTQPPSASGTPGQRVTISCSGSSSNIGSNTVNWYQQLPGTAPKLLIYSNNQR |
| 003 | PSGVPDRFSGSKSGTSASLAISGLQSEDEADYYCAAWDDSLNGWVFGGGTKLTV |
| | L (SEQ ID NO: 437) |
| hN1S3- | QAVLTQPSSVSGTPGQRVTMSCSGGRSNIGSNAVNWYQQFPGTAPKLLMYNTN |
| 007 | QRPSGVPGRFSGSKSGASASLAISGLQSDDEADYYCSSWDDSLNGLEFGGGTKL |
| | TVL (SEQ ID NO: 438) |
| hN1S3- | QSVVTQPPSASGTPGQRVTISCSGSSSNIGSNTVNWYQQLPGTALKLLIYSNNQR |
| 023 | PSGVPDRFSGSKSGTSASLAISGLQSEDEADYYCAAWDDSLNGYVFGTGTKLTVL |
| | (SEQ ID NO: 439) |
| hN1S3- | QAVLTQPSSVSGAPGQRVTISCTGSSSNIGAGYDVHWYRQLPGTAPKLLLYGNDN |
| 032 | RPSGVPDRFSGSKSGASASLAITGLRADDEADYYCQSYDSSLSGSVFGGGTKVTV |
| | L (SEQ ID NO: 440) |
| hN1S3- | QAVLTQPSSVSGAPGQRVTISCTGSSSNIGAGYDVHWYQQLPGTAPKLLIYGNSN |
| 035 | RPSGVPDRFSGSKSGTSASLAITGLQAEDEADYYCQSYDSSLSGSVFGGGTKVTV |
| | L (SEQ ID NO: 441) |
| hN1S3- | QSVLTQPPSASGTPGQGVTISCSGSSSNIGRNSVNWYQQLPGTAPKLLIYGDNQR |
| 040 | PSGVPDRFSGSKPGTSASLAISGLQSDDEAHYYCAAWDDSLNGWVFGGGTKVTV |
| | L (SEQ ID NO: 442) |
| hN1S3- | QAVLTQPSSVSGAPGQRVTISCTGSRSNIGAGYDVHWYQQLPGTAPKLLIYGNSN |
| 053 | RPSGVPDRFSGSKSGTSASLAITGLQAEDEADYYCQSYDSSLSGSVFGGGTKLTV |
| | L (SEQ ID NO: 443) |
| hN1S3- | QSVLTQPPSASGTPGQRVTISCSGSSSNIGSNTVTWYQQVPGTAPKVLIYTNIQRP |
| 055 | SGVPDRFSGSKSGTSASLAISGLQSEDESDYFCAAWDDSLNGVVFGGGTKLTVL |
| | (SEQ ID NO: 444) |
| hN1S3- | SYELTQPPSASGTPGQRVTISCSGSSSNIGSNPVNWYQHLPGTAPKLLIYSDSQRP |
| 147 | SGVPDRFSGSKSGTSASLAISGLQSEDEADYYCATWDDSLSGWVFGGGTKLTVL |
| | (SEQ ID NO: 445) |
| hN1S3- | HVILTQPPSASGTPGQRVTISCSGGGSNIGSNTVNWYQHLPGTAPKLLIYNNDQRP |
| 082 | SGVPDRFSGSKSGTSASLAISGLQSEDEADYYCAAWDDSLNGWLFGGGTKLTVL |
| | (SEQ ID NO: 446) |
| hN1S3- | QSVLTQPPSVSGTPGQRVTISCSGSSSNIGNDVVNWYQQLPGTAPKLLIYNDYQR |
| 088 | PSGVSDRFSGSKSGTSAYLAISGLQSEDEADYHCAVWDDSLDGWVFGGGTKLTV |
| | L (SEQ ID NO: 447) |
| hN1S3- | QPVLTQPPSASGTPGQRVTISCSGSSSNIASNSVYWYQQLPGTAPKLLIYRNNQR |
| 096 | PSGVPDRFSGSQSGASASLAISGLRSEDEADYYCAAWDDNLYGVVFGGGTKLTV |
| | L (SEQ ID NO: 448) |
| hN1S3- | LPVLTQPPSASGTPGQRVTISCSGSSSNIGNNYVYWYQQLPGTAPKLLIYRNNQR |
| 112 | PSGVPDRFSASKSGTSASLVISGIRSEDEAEYYCGGWDDSLSGQVVFGGGTKLTV |
| | L (SEQ ID NO: 449) |
| hN1S3- | QAVLTQPSSASGTPGQRVTISCSGSSSNIGSNTVNWYQQLPGTAPKLLIYATNQR |
| 124 | PSGVPDRFSGSESGTSASLAIRGLQSEDEADYYCAAWDDSLNGKVFGGGTKVTV |
| | L (SEQ ID NO: 450) |
| hN1S3- | QSVLTQPPSVSGAPGQRVTISCSGSTSNIGGNPVTWYQQFPGTAPKLLVYRDNQ |
| 127 | RPSGVADRFSGSRSGTSASLAISGLQSEDEADFYCASWDDSLGGVVFGGGTKLT |
| | VL (SEQ ID NO: 451) |
| hN1S3- | QAVLTQPSSESGTPGQRVTISCSGTTSNIGDNTVTWYQQLPGTAPKLLIYSNTQRP |
| 136 | SGVPARFSGSKSGTSASLAISGLQSGDEADYYCAAWDDSRNGYVFGTGTKLTVL |
| | (SEQ ID NO: 452) |
| hN1S3- | QAVLTQPSSASGTPGQRVTISCSGSSSNIGTNYVYWYQHLPGMAPKLLLYSNNQR |
| 177 | PSGVPDRFSGSKSGPSASLAISGLRSEDEADYYCAAWDDSLSGLVFGGGTKLTVL |
| | (SEQ ID NO: 453) |
| hN1S3- | SYVLTQPPSASGTPGQRVTISCSGSSPNIGSNTVNWYQQLPGTAPKLLIYTNNQRP |
| 181 | SGVPDRFSGSKSATSASLAISGLQFDDEADYFCAAWDDSLLGVVFGGGTKVTVL |
| | (SEQ ID NO: 454) |
| hN1S3- | QAVLTQPSSVSGAPGQRVTISCTGSSSNIGSPYDVNWYQQFPGTAPKLLIYGNINR |
| 182 | PSGVPDRFSGSKSGTSASLAITGLQAEDEADYYCQTYDSTLNGAVFGGGTKLTVL |
| | (SEQ ID NO: 455) |
| hN1S3- | QSVLTQPPSASGTPGQRVTISCSGSSSNIGGNYVYWYQQLPGTAPKLLIYRSNQR |
| 184 | PSGVPDRFSGSKSGTSASLAISGLRSEDEADYYCAAWDDSLHGVIFGGGTKLTVL |
| | (SEQ ID NO: 456) |
| hN1S3- | QAVLTQPSSASGTPGQRVTISCPGSSSNIGSNTVNWYQQLPGTAPKLLIYTNNQR |
| 191 | PSGVPDRFSASKSGTSASLAISGLQSEDEADYYCAAWDDSLNGYVFGTGTKLTVL |
| | (SEQ ID NO: 457) |
| hN1S3- | QSVLTQPPSASGTPGQRVTISCSGSSSNIGSNTVNWYQRLPGAAPQLLIYNNDQR |
| 002 | PSGIPDRFSGSKSGTSGSLVISGLQSEDEADYYCASWDDSLNGRVFGGGTKLTVL |
| | (SEQ ID NO: 458) |
| hN1S3- | QAVLTQPSSASGTAGQRVTISCSGSNSNIGSNTVNWYQQLPGTTPKLLIYSNNER |
| 006 | PSGVPDRFSGSKSGTSASLAISGLQSDDEADYYCAAWDDSLNGYVFGTGTKVTVL |
| | (SEQ ID NO: 459) |
| hN1S3- | QSVLTQPPSASGTPGQRVSISCSGSSSNIGSNYVYWYQQLPGTAPKVLVYRNNQ |
| 030 | RPSGVSDRFSGSKYGTSASLAISGLRSEDEADYYCGSWDDSLSGVVFGGGTKVT |
| | VL (SEQ ID NO: 460) |
| hN1S3- | QSVLTQPPSASGTPGQRVTISCSGSSSNIGSNYVYWYQQLPGTAPKLLIYRNNQR |
| 036 | PSGVPDRFSGSKSGTSASLAISGLRSEDEADYYCAAWDDSLSGVVFGGGTKVTVL |
| | (SEQ ID NO: 461) |
| hN1S3- | QSVVTQPPSASGTPGQRVTISCSGSSSNIGSNYVYWYQQLPGTAPKLLIYRNNQR |
| 038 | PSGVPDRFSGSKSGTSASLAISGLRSEDEADYYCAAWDDSLSGVVFGGGTKLTVL |
| | (SEQ ID NO: 462) |
| hN1S3- | QSVLTQPPSASGTPGQRVTISCSGGSSNIGSNTVTWYQQLPGKAPKLLIYISDQRP |
| 074 | SGVPDRFSGSKSGTSASLAIRGLQSEDEADYYCAAWDDSLNGAVFGTGTKVTVL |
| | (SEQ ID NO: 463) |
| hN1S3- | QSVVTQPPSLSAAPGQRVTISCSGSHSNIGNFYVSWYQQVPGAAPKLLIYDNNER |
| 077 | PSGIPDRFSGSKSGTSATLDITGLQTGDEADYYCSTWDRSLSASVFGSGTKLTVL |
| | (SEQ ID NO: 464) |
| hN1S3- | QSVLTQPPSASGSPGRSVTISCTGTSRDVGAYNYVSWYQQHPGEAPKLLISEVTK |
| 083 | RPSGVPARFSASKSGNTASLTISGLQAEDEGDYYCSSYAGSDSWVFGGGTKLTVL |
| | (SEQ ID NO: 465) |
| hN1S3- | NFMLTQPHSVSESPGKTVTISCTRSSGSIGSSYVQWYQQRPGTSPVTIIYEDSQRP |
| 087 | SGVPDRFSGSIDNSANSASLTISGLKTEDEADYYCQSYDANNRVFGGGTKLTVL |
| | (SEQ ID NO: 466) |
| hN1S3- | QSVLTQPPSATGTPGQTVSISCSGGNSNIGSNYVSWYQQLPGTAPKLLIYSNNQR |
| 091 | PSGVPDRFSGSKSGTSASLAISGLQSEDEADYYCAAWDDSLNGHIFGTGTKLTVL |
| | (SEQ ID NO: 467) |
| hN1S3- | QSVLTQPPSASGTPGQRVTISCSGSSSNIGANYVYWYQQLPGTAPKLLIYKNDQR |
| 092 | PSGVPDRFSGSKSGTSASLAISGLRSEDEADYYCAAWDDSLSGLVFGGGTKVTVL |
| | (SEQ ID NO: 468) |
| hN1S3- | QSVLTQPPSASGTPGQRVTISCSGSNSNIGSNTVNWYQQLPGTAPKVLIYGNLQR |
| 095 | PSGVPDRFSGSKSGTSASLAISGLQSEDEADYYCATWDDSLNGFVFGTGTKLTVL |
| | (SEQ ID NO: 469) |
| hN1S3- | QSVLTQPPSASGTPGQRVTISCSGSSSNIGSNTVNWYQRLPGAAPQLLIYNNDQR |
| 107 | PSGIPDRFSGSKSGTSGSLVISGLQSEDEADYYCASWDDSLNGRVFGGGTKLTVL |
| | (SEQ ID NO: 470) |
| hN1S3- | QSVLTQPPSVSEAPRQRVTISCSGSSSNIGNNAVNWYQQLPGEAPKLLIYYDDLLP |
| 133 | SGVSDRFSGSKSGSSASLAISGLQAEDEADYYCATWDDSLNAWVFGGGTKVTVL |
| | (SEQ ID NO: 471) |
| hN1S3- | LPVLTQPPSVSEAPRQRVTISCSGSSFNIGNNAVNWYQQLPGKAPKLLIYYDDLLP |
| 135 | SGVSDRFSGSKSGTSASLAISGLQSEDEADYYCAAWDDSLNAVVFGGGTKVTVL |
| | (SEQ ID NO: 472) |
| hN1S3- | QSVLTQPPSASGTPGQRVTISCSGSYSNIGSNYVYWYQQFPGTAPKLLIYTNNQR |
| 141 | PSGVPDRFSGSKSGSSASLAISGLRSEDEADYYCAAWDDSVGVLLFGGGTKLTVL |
| | (SEQ ID NO: 473) |
| hN1S3- | QSVVTQPPSASGTPGQRVTISCSGSSSNIGSNTVNWYQQLPGTAPKLLIYSNNQR |
| 151 | PSGVPDRFSGSKSGTSASLAISGLQSEDEADYYCAAWDDSLNGGVFGGGTKLTV |
| | L (SEQ ID NO: 474) |
| hN1S3- | QAVLTQPSSVSGAPGQRVIISCTGTSSNTGAGYYVNWYQQLPGAAPKVLIFGNDN |
| 153 | RPSGVPDRFSGAKSGTSASLAITGLQAEDEADYYCQSYDRSLSGWVFGGGTKLT |
| | VL (SEQ ID NO: 475) |
| hN1S3- | SSELTQDPAVSVALGQTVRITCQGDSLRSNYPSWYQQKPGQAPLLVIYSENRRPS |
| 190 | GIPDRFSASRSGNTASLTITGAQAEDEADYYCHSRGSSGNHKVFGGGTQLTVL |
| | (SEQ ID NO: 476) |
| hN1S3- | DIVMTQSPSTLSASVGDRVTITCRASQGISSWLAWYQQKPGRAPKVLIYKASTLES |
| 108 | GVPSRFSGSGSGTDFTLTISSLQPEDFATYYCQQSYSTPWTFGQGTKLEIK (SEQ |
| | ID NO: 477) |
| hN1S3- | DIVMTQSPSTLSASVGDRVTITCRASQGISSWLAWYQQKPGRAPKVLIYKASTLES |
| 130 | GVPSRFSGSGSGTDFTLTISSLQPEDFATYYCQQSYSTPWTFGQGTKLEIK (SEQ |
| | ID NO: 478) |
| N1wc11 | QPVLTQPPSASGTPGQRVTISCSGSSSNLGINTVNWYQQVPGTAPKLLIYSDHQR |
| | PSGVPDRFSGSKSATSASLAISGLQSEDEADYYCAAWDDSLNGWVFGGGTKLTV |
| | L (SEQ ID NO: 479) |
| N1wc13 | QSVLTQPPSASGTPGQRVTIPCSGSSSNIGSNYVYWYQQLPGTAPKLLIYRNNQR |
| | PSGVPDRFSGSKSGTSASLAISGLRSEDEADYYCAAWDDSLSGLVFGGGTKVTVL |
| | (SEQ ID NO: 480) |
| N1wc15 | SYVLTQPPSASGTPGQRVTVSCSGSSSSIGSNTVNWYQQLPGTAPKLLIYSNNQR |
| | PSGVPDRFSGSKSGTSASLAISGLQSEDEADYYCAAWDDSLNGLVFGGGTKLTVL |
| | (SEQ ID NO: 481) |
| N1wc16 | QSVLTQPPSVSVAPGQTATLSCVGDAIERKSVHWYQQRPGQAPVLVVHDDSDRP |
| | SGIPDRISGSNSGNTATLTITRVEVGDEADYFCQVWDTSSGHDAVVFGGGTKLTVL |
| | (SEQ ID NO: 482) |
| N1wc21 | SYELTQPPSVSVSPGQTARITCSGDALPDKYVHWYQQKSGQAPVLVLFDDSKRPS |
| | GIPERFSGSSSGTVATLIISGAQVEDEGDFFCYSTDSSGNERVFGGGTKLTVL |
| | (SEQ ID NO: 483) |
| N1wc24 | QSVLTQPPSVSGAPRQRVTISCSGSSSNIENNIVNWYQQLPGEAPKLLIYYDNLLP |
| | SGVSDRFSGSKSGTSASLAISGLQSGDEADYYCAAWDDSLKAWFGGGTKLTVL |
| | (SEQ ID NO: 484) |
| N1wc72 | QPVLTQPPSASGTPGQRVTISCSGSYSNIGSNYVYWYQQFPGTAPKLLIYTNNQR |
| | PSGVPDRFSGSKSGSSASLAISGLRSEDEADYYCAAWDDSVGVLLFGGGTKVTVL |
| | (SEQ ID NO: 485) |
| N1wc79 | QSVLTQPPSASGTPGQRVTISCSGSTSNIGKNTVNWYQQLPATAPKLLIYSDNQRP |
| | SGVPDRFSGSKSGTSASLAISGLQSEDESDYYCAAWDDSLDGLVFGGGTKLTVL |
| | (SEQ ID NO: 486) |
| N1wc82 | QSVLTQPPSVSATPGQKVTISCSGSNSNIGNNYVSWYQQLPGTAPKLLIYDSDQR |
| | PAGIPDRFSGSKLGTSATLGITGLQTGDEADYYCATWDAGLSVLIFGGGTKLTVL |
| | (SEQ ID NO: 487) |
| N1wc102 | QPVLTQPPSASGTPGQRVAISCSGSSSNIGSNPVNWYQQLPGTAPKLLIYGDNQR |
| | PSGVPDRFSGSKSGTSASLAVSGLQSEDEADYFCAAWDDSLNGVVFGGGTKLTV |
| | L (SEQ ID NO: 488) |
| N1wc113 | QAVLTQPSSVSGAPGQRVTISCTGSSSNIGAGNDVHWYRQFPGTAPKLLIYGNNK |
| | RPSGVSDRFSGSKSGTSASLAITGLQVEDEADYYCQSYDSSLGGSDVFGGGTKLT |
| | VL (SEQ ID NO: 489) |
| N1wc117 | QSVLTQPPSASGTPGQRVTISCSGSSSNIGGNTVNWYQQLPGTAPKLLIYGTNQR |
| | PSGVPDRFSGSKSGTSASLAISGLQSEDEADYYCAAWDDFLNGKVFGGGTKLTVL |
| | (SEQ ID NO: 490) |
| N1wc125 | QSVLTQPASVSGSPGQSITISCTGTSSDVGGYNYVSWYQQHPGKAPKLMIYEGSK |
| | RPSGVSNRFSGSKSGNTASLTISGLQAEDEADYYCSSYTTRSTRVFGGGTKLTVL |
| | (SEQ ID NO: 491) |
| N1wc127 | SYVLTQPPSTSGAPGQRVTISCSGSSSNIGSNGVNWYHHLPGTAPKLLIYSNFHRP |
| | SGVPDRFSGSKSGTSATLAISGLQSEDEADYYCAAWDDSLNDYVFGVGTKVTVL |
| | (SEQ ID NO: 492) |
| N1wc129 | QSVLTQPPSASGTPGQRATISCSGSGSNIGRNAVNWFQQLPGAAPKLLIYSNIHRP |
| | SGVPDRISGSKSGTSATLAISGLQSEDEADYYCATWDDSLNDYVFGTGTKLTVL |
| | (SEQ ID NO: 493) |
| N1wc130 | QAVLTQPSSVSGAPGQRVTISCTGTGSNIGAGYDVHWYQQLPGTAPKLLIYANTN |
| | RPSGVPDRFSGSKSGTSASLAITGLQAEDEADYYCQSYDSSLSGSVFGGGTKVTV |
| | L (SEQ ID NO: 494) |
| N1wc131 | SYELTQPPSASGTPGQRVTISCSGTSSNIGINYVYWYQQLPRTAPKLLIYYNNQRP |
| | SGVPDRFSGSRSGTSASLAISGLRSEDEADYYCAAWDDSLSGLVFGTGTKLTVL |
| | (SEQ ID NO: 495) |
| N1wc132 | QSVLTQPPSASGTPGQRVTISCSGSSSNIGSNPVNWYQQLPGSAPKLLVYSDDQR |
| | PSGVPDRFSGSKSGASASLAISGLQSEDESDYYCAAWDDSQNAVVFGGGTKVTV |
| | L (SEQ ID NO: 496) |
| N1wc135 | LPVLTQPPSASGTPGQRVIISCSGSSSNIGSNYVYWYQQLPGTAPKLLIYRNNQRP |
| | SGVPDRFSGSKSGTSASLAISGLRSEDEADYHCAAWDDSLSGVVFGGGTKLTVL |
| | (SEQ ID NO: 497) |
| N1wc150 | SYELTQPPSASGTPGQRVTISCSGSGSNIGKNTVNWYQQLPGAAPKLLIYSNNER |
| | PSGVPGRFSGSKSGTSASLAISGLQSEDETDYYCAAWDDSLNDMVFGGGTKVTV |
| | L (SEQ ID NO: 498) |
| N1wc164 | QAVLTQPSSVSGAPGQRITISCTGTSSNIGAGYDVEWYQHLPGTAPKLLIYRNSNR |
| | PSGVPDRFSASKSGTSASLVITGLQAEDEADYYCQSYDTRLSDSVIFGGGTKLTVL |
| | (SEQ ID NO: 499) |
| N1wc170 | SYELTQPPSVSVAPGQTARITCGGENIGTKSVHWYQQKSGQAPVLVIYEDKKRPS |
| | GIPDRFSGSSSGTMATLTITGAQVDDEADYYCYSADNTGDQRMFGGGTKLTVL |
| | (SEQ ID NO: 500) |
| N1wc177 | QAVLTQPSSASGTPGQRVIISCSGSSSNIGKYIVNWYQQLPGAAPKLLIYTYNERPS |
| | GVPARFSGSTSGTSASLAITGLQSEDEADYYCASWDDSLNVVVFGGGTKLTVL |
| | (SEQ ID NO: 501) |
| N1wc182 | QSVVTQPPSASGTPGQRVTISCSGSSSNIGSNTVNWYQQLPGMAPKLLIYSNNQR |
| | PPGVPDRFSGSKSGTSASLAISGLQSEDEADYYCAAWDDSLNGNWVFGGGTKLT |
| | VL (SEQ ID NO: 502) |
| N1wc197 | QSVLTQPPSASGTPGQRVTISCSGSSSNIGSNYVYWYQKFPGTAPKLLIYTNNQR |
| | PSGVPDRFSGSKSGTSASLAISGLRSEDEADYYCAAWDDSLSGVVFGGGTKVTVL |
| | (SEQ ID NO: 503) |
| N1wc225 | QSVVTQPPSVSGAPGQRVTISCTGSSSNIGAGYDVHWYQQLPGTAPKLLIYGNSN |
| | RPSGVPDRFSGSKSGTSASLAITGLQAEDEADYYCQSYDSSLSGSVFGGGTKLTV |
| | L (SEQ ID NO: 504) |
| N1wc239 | QSVLTQPPSASGTPGQRVAISCSGSHSNIRSNDVYWYQQFPGTAPKLLIYSNDQR |
| | PSGVSDRFAGSKSGTSASLAISGLRSEDESDYYCATWDDSLSGVVFGGGTKLTVL |
| | (SEQ ID NO: 505) |
| N1wc241 | QSVLTQPPSASGTPGQRVTISCSGSFSNIGSNNVYWYQQLAGTAPKLLIYRNNER |
| | PSGVPDRFSGSKSGTSASLAISGLRSEDEADYYCAVRDDSLSGHYVFGSGTKVTV |
| | L (SEQ ID NO: 506) |
| N1wc248 | QSVLTQPPSASGTPGQRVTISCSGSSSNIGSNSVYWYQQFPGTAPKLLIYRNNQR |
| | PSGVPDRFSGSKSDTSASLAISGLRSEDEADYYCATWDDSLSGVVFGGGTKLTVL |
| | (SEQ ID NO: 507) |
| N1wc266 | QAVLTQPSSVSGTPGQRVTMSCSGGRSNIGSNAVNWYQQFPGTAPKLLMYNTN |
| | QRPSGVPGRFSGSKSGASASLAISGLQSDDEADYYCSSWDDSLNGLEFGGGTKL |
| | EIK (SEQ ID NO: 508) |
| N1wc281 | QSVLTQPPSVSVSPGQTASITCSGDKLGDKYTFWYQQKPGQSPVLIIYQDTKRPS |
| | GIPERFSGSNSGNTATLTISGTQAMDEADYYCQAWDSNTDHVIFGGGTKLTVL |
| | (SEQ ID NO: 509) |
| N1wc289 | QAVLTQPSSLSASPGASASLTCTLRSDINLETSRIYWFQQKPGSPPRYLLRYQSDS |
| | DNNLDSGVPSRFSGSKDASANAGILLISGVQSEDEADYHCMIWHSGGSVFGGGTK |
| | VTVL (SEQ ID NO: 510) |
| N1wc295 | QSVLTQPPSASGTPGQRVTISCSGNRSNIGSNTVNWYQQLPGTAPKLLIYSNDQR |
| | PSGVPDRFSGSKSGTSASLTISGLQSDDEADFYCAAWDDNLNGYVFGSGTKVTVL |
| | (SEQ ID NO: 511) |
| N1wc301 | QSVVTQPPSASGTPGQRVTISCSGSSSNIGKNNVYWYQQLPGAAPKLLIYRNHER |
| | ASGVPDRFSGSKSGTSASLAISGLQSEDEADYYCAARDDSLNGYVFGTGTKVTVL |
| | (SEQ ID NO: 512) |
| N1wc319 | QSVLTQPPSSSGTPGQRVTISCSGSSSNIGSNSVNWYQQLPGAAPKLLIYSDNQR |
| | PSGVPDRFSASKSYTSASLAISGLQSGDEADYFCATWDDSLTGLVFGGGTKLTVL |
| | (SEQ ID NO: 513) |
| N1wc336 | QAVLTQPSSASGTPGQRVTISCSGSYSNIGSNYVYWYQQLPGTAPKLLIYTNNQR |
| | PSGVPDRFSGSKSGTSASLVISGLRSDDEGDYYCAAWDDSVSVLLFGGGTKLTVL |
| | (SEQ ID NO: 514) |
| N1wc338 | QSVLTQPPSASGTPGQRVTISCSGSSSNIGTYTVNWYQQHPGTAPKLLIYSNDQR |
| | PSGVPDRFSGSRSGTSASLAISGLRSEDEADYYCAAWDDSLHGYVFRTGTKLTVL |
| | (SEQ ID NO: 515) |
| N1wc403 | QAVLTQPSSASGTPGQRVTISCPGSSSNIGSNTVNWYQQLPGTAPKLLIYTNNQR |
| | PSGVPDRFSASKSGTSASLAISGLQSEDEADYYCAAWDDSLNGYVFGTGTKLTVL |
| | (SEQ ID NO: 516) |
| N1wc441 | SYELTQPPSVSVSPGQTARITCSGDALPDKYVHWYQQKSGQAPVLVLFDDSKRPS |
| | GIPERFSGSSSGTVATLIISGAQVEDEGDFFCYSTDSSGNERVFGGGTKLTVL |
| | (SEQ ID NO: 517) |
| N1wc476 | QAVLTQPSSVSGTPGQTVTISCSGSNSNIGNNYVYWYQQLPGSAPKVVIYRNHQR |
| | PSGVPDRFSGSKSGTAASLAISGLRSEDEADYYCASWDDSLSGLVFGGGTKLTVL |
| | (SEQ ID NO: 518) |
| N1wc516 | QPVLTQPPSASGTPGQRVTISCSGSSSNIGSNTVNWYQQLPGTAPKLLIYSNNQR |
| | PSGVPDRFSGSKSGTSASLAISGLQSEDEADYYCAAWDDSLNDVVFGGGTKLTVL |
| | (SEQ ID NO: 519) |
| N1wc535 | QSVLTQPPSASGTPGQRVTLSCSGSSSNIGSNTVNWYQQLPGTAPKVLIYSDNQR |
| | PSGVPDRFSGSKSGTSASLAISGLQSDDEAVYYCAGWDDSLNAYLFGTGTKVTVL |
| | (SEQ ID NO: 520) |
| N1wc540 | QAVLTQPSSASGTPGQRVTISCSGSSSNIGSYTVNWYQQVPGTAPKLLIYSNNQR |
| | PSGVPERFSGSKSGTSASLAISGLQSEDEADYYCAAWDDSLSDVLFGGGTKLTVL |
| | (SEQ ID NO: 521) |
| N1wc558 | LPVLTQPPSASGTPGQRVTISCSGSSSNIGSNSVNWYQQLPGTAPKLLIYSNNQRP |
| | SGVPDRFSGSQSGTSASLAISGLRSEDEADYYCAAWDDSLNNLVFGGGTKLTVL |
| | (SEQ ID NO: 522) |
| N1wc570 | QSVLTQPPSASATPGQTVTISCSGSTSNIGNNNVNWYQQVPGTAPKLLMYSNNQ |
| | RPSGVPDRFSGSRSGTSASLAITALQSEDEADYYCATWDDSLSAWVFGGGTKVT |
| | VL (SEQ ID NO: 523) |
| N1wc572 | LPVLTQPPSASGTPGQRVTISCSGSSSNIGSNPVNWYQQLPGSAPKLLVYSDDQR |
| | PSGVPDRFSGSKSGASASLAISGLQSEDESDYYCAAWDDSLNAVVFGGGTKVTVL |
| | (SEQ ID NO: 524) |
| N1wc586 | DIVMTQSPSTLSASVGDRVTITCRASQGISSWLAWYQQKPGRAPKVLIYKASTLES |
| | GVPSRFSGSGSGTDFTLTISSLQPEDFATYYCQQSYSTPWTFGQGTKLEIK (SEQ |
| | ID NO: 525) |
| N1wc614 | QSVLTQPPSASGTPGQRVTISCSGSSSNIGSNTVNWYQQLPGTAPKLLIYSNNQR |
| | PSGVPDRFSGSKSGTSASLAISGLQSEDEADYYCAAWDDSLNGLVFGGGTKVTVL |
| | (SEQ ID NO: 526) |
| N1wc621 | QAVLTQPSSVSGAPGQTVTISCAGSSSNLGAGYDAHWYQHLPGAVPRLLIYNNSK |
| | RPSGVPDRFSASKSGSSASLAITGLQPEDEADYYCQTYDTRLSGSMLFGGGTKVT |
| | VL (SEQ ID NO: 527) |
| N1wc624 | QSVLTQPPSASGTPGQGVTISCSGSSSNIGSNTVNWYQQLPGTAPKLLIYSNNQR |
| | PSGVPDRFSGSKSGTSASLAISGLQSEDEADYYCAAWDDSLNGKVFGTGTKVTVL |
| | (SEQ ID NO: 528) |
| N1wc633 | QAVLTQPSSASGTPGQRVTISCSGSSSNIGSYTVNWYQQVPGTAPKLLIYSNNQR |
| | PSGVPERFSGSKSGTSASLAISGLQSEDEADYYCAAWDDSLSDVLFGGGTKVTVL |
| | (SEQ ID NO: 529) |
| N1wc39 | DIQLTQSPSSVSASIGDTVTITCRASQNINKWLAWYQQKPGKAPYLLISTASNLQSG |
| | VPSRFSGTGSGTAFTLTISRVQPEDFANYYCQQAFSFPITFGQGTRLEIK (SEQ ID |
| | NO: 530) |
| N1wc45 | SSELTQDPAVSVALGQTVRITCQGDSLRSYYASWYQQKPGQAPVLVIYGKNNRPS |
| | GIPDRFSGSSSGNTASLTITGAQAEDEADYYCNSRDSSGNHVVFGGGTKLTVL |
| | (SEQ ID NO: 531) |

B. DNA sequence

Heavy Chain
>hN1S3-001
GAGGTGCAGCTGGTGCAGTCTGGGGCTGAGGTGAAGAAGCCTGGGGCCTCAGTGAAGGTCTCCTG
CAAGGCTTCTGGATACAACTTCACCGGCTACTATATGCACTGGGTGCGACAGGCCCCTGGACAAGG
ACTTGAGTGGATGGGATGGATCAACCCTAACAGTGGTGGCACAAACTATGCACAGAAGTTTCAGGG
CAGGGTCACCATGACCAGGGACACGTCCATCAGCACAGCCTACATGGAGCTGAGCAGGCTGAGATC
TGACGACACGGCCGTGTATTACTGTGCGACAGACTCCTTTGACTACTGGGGCCAGGGGACAATGGT
CACCGTCTCGAGT (SEQ ID NO: 532)
> hN1S3-003
GAGGTCCAGCTGGTGCAGTCTGGGCCTGAGGTGAAGAAGCCTGGGACCTCAGTGAAGGTCTCCTG
CAAGGCTTCTGGATTCACCTTTACTAACTCTGCTGTGCAGTGGGTGCGACAGGCTCGTGGACAACG
CCTTGAGTGGATAGGATGGATCGTCGTTGGCAGTGGTAACACAAACTACGCACAGAAGTTCCAGGA
AAGAGTCACCATTACCAGGGACATGTCCACAAGCACAGCCTACATGGAGCTGAGCAGCCTGAAATC
CGAGGACACGGCCGTGTATTATTGTGTGGCAGATACGGTCTACTGGGGCCAGGGCACCCTGGTCAC
CGTCTCGAGT (SEQ ID NO: 533)
> hN1S3-007
CAGGTGCAGCTGGTGCAGTCTGGGGCTGAGGTGAAGAAGCCTGGGGCCTCAGTGAAGGTCTCTTG
CAAGGCTTCTGGATACAACTTCACCGGCTACTATATGCACTGGGTGCGACAGGCCCCTGGACAAGG
GCTTGAGTGGATGGGATGGATCAACCCTAACAGTGGTGGCACAAACTATGCACAGAAGTTTCAGGG
CAGGGTCACCATGACCAGGGACACGTCCATCAGCACAGCCTACATGGAGCTGAGCAGGCTGAGATC
TGACGACACGGCCGTGTATTACTGTGCGACAGACTCCTTTGACTACTGGGGCCAGGGGACAATGGT
CACCGTCTCGAGT (SEQ ID NO: 534)
> hN1S3-023
GAGGTGCAGCTGGTGCAGTCTGGGGCTGAGGTGAAGAAGCCTGGGGCCTCAGTGAAGGTCTCCTG
CAAGGCTTCTGGATACAACTTCACCGGCTACTATATGCACTGGGTGCGACAGGCCCCTGGACAAGG
ACTTGAGTGGATGGGATGGATCAACCCTAACAGTGGTGGCACAAACTATGCACAGAAGTTTCAGGG
CAGGGTCACCATGACCAGGGACACGTCCATCAGCACAGCCTACATGGAGCTGAGCAGGCTGAGATC
TGACGACACGGCCGTGTATTACTGTGCGACAGACTCCTTTGACTACTGGGGCCAGGGGACAATGGT
CACCGTCTCGAGT (SEQ ID NO: 535)
> hN1S3-032
GAGGTGCAGCTGGTGCAGTCTGGGGCTGAGGTGAAGAAGCCTGGGGCCTCAGTGAAGGTCTCTTG
CAAGGCTTCTGGATACAACTTCACCGGCTACTATATGCACTGGGTGCGACAGGCCCCTGGACAAGG
GCTTGAGTGGATGGGATGGATCAACCCTAACAGTGGTGGCACAAACTATGCACAGAAGTTTCAGGG
CAGGGTCACCATGACCAGGGACACGTCCATCAGCACAGCCTACATGGAGCTGAGCAGGCTGAGATC
TGACGACACGGCCGTGTATTACTGTGCGACAGACTCCTTTGACTACTGGGGCAAGGGAACCCTGGT
CACCGTCTCGAGT (SEQ ID NO: 536)
>hN1S3-035
CAGGTCCAGCTGGTGCAGTCTGGGGCTGAGGTGAAGAAGCCTGGGGCCTCAGTGAAGGTCTCCTG
CAAGGCTTCTGGATACAACTTCACCGGCTACTATATGCACTGGGTGCGACAGGCCCCTGGACAAGG
GCTTGAGTGGATGGGATGGATCAACCCTAACAGTGGTGGCACAAACTATGCACAGAAGTTTCAGGG
CAGGGTCACCATGACCAGGGACACGTCCATCAGCACAGCCTACATGGAGCTGAGCAGGCTGAGATC
TGACGACACGGCCGTGTATTACTGTGCGACAGACTCCTTTGACTACTGGGGCCAAGGCACCCTGGT
CACCGTCTCGAGA (SEQ ID NO: 537)
> hN1S3-040
GAGGTCCAGCTGGTGCAGTCTGGGCCTGAGGTGAAGAAGCCTGGGACCTCAGTGAAGGTCTCCTG
CAAGGCTTCTGGATTCACCTTTACTAGCTCTGCTGTGCAGTGGGTGCGACAGGCTCGTGGACAACG
CCTTGAGTGGATAGGATGGATCGTCGTTGGCAGTGGTAACACAAACTACGCACAGAAGTTCCAGGA
AAGAGTCACCATTACCAGGGACATGTCCACAAGCACAGCCTACATGGAGCTGAGCAGCCTGAGATC
CGAGGACACGGCCGTGTATTATTGTGTGGCAGATACGGTCTACTGGGGGCGAGGGACCACGGTCA
CCGTCTCGAGT (SEQ ID NO: 538)
> hN1S3-053
GAAGTGCAGCTGGTGCAGTCTGGGGCTGAGGTGAAGAAGCCTGGGGCCTCAGTGAAGGTCTCCTG
CAAGGCTTCTGGATACAACTTCACCGGCTACTATATGCACTGGGTGCGACAGGCCCCTGGACAAGG
GCTTGAGTGGATGGGATGGATCAACCCTAACAGTGGTGGCACAAACTATGCACAGAAGTTTCAGGG
CAGGGTCACCATGACCAGGGACACGTCCATCAGCACAGCCTACATGGAGCTGAGCAGGCTGAGATC
TGACGACACGGCCGTGTATTACTGTGCGACAGACTCCTTTGACTACTGGGGGCGGGGGACCACGGT
CACCGTCTCGAGT (SEQ ID NO: 539)
> hN1S3-055
CAGGTCCAGCTGGTGCAGTCTGGAGCTGAGGTGAAGAAGCCTGGGGCCTCAGTGAAGGTCTCCTG
CAAGGCTTCTGGATACAACTTCACCGGCTACTATATGCACTGGGTGCGACAGGCCCCTGGACAAGG
ACCTGAGTGGATGGGATGGATCAACCCTAACAGTGGTGGCACAAACTATGCACAGAAGTTTCAGGG
CAGGGTCACCATGACCAGGGACACGTCCATCAGCACAGCCTACATGGAGCTGAGCAGGCTGAGATC
TGACGACACGGCCGTGTATTACTGTGCGACAGACTCCTTTGACTACTGGGGCCGGGGGACAATGGT
CACCGTCTCGAGT (SEQ ID NO: 540)
> hN1S3-147
CAGGTGCAGCTGGTGCAGTCTGGGCCTGAGGTGAAGAAGCCTGGGACCTCAGTGAAGGTCTCCTG
CAAGGCTTCTGGATTCACCTTTACTAGCTCTGCTGTGCAGTGGGTGCGACAGGCTCGTGGACAACG
CCTTGAGTGGATAGGATGGATCGTCGTTGGCAGTGGTAACACAAACTACGCACAGAAGTTCCAGGA
AAGAGTCACCATTACCAGGGACATGTCCACAAGCACAGCCTACATGGAGCTGAGCAGCCTGAGATC
CGAGGACACGGCCGTGTATTACTGTGTGGCAGATACGGTCTACTGGGGCAAAGGAACCCTGGTCAC
CGTCTCGAGT (SEQ ID NO: 541)
> hN1S3-082
CAGGTGCAGCTGGTGCAATCTGGGCCTGAGGTGAAGAAGCCTGGGACCTCAGTGAAGGTCTCCTG
CAAGGCTTCTGGATTCACCTTTACTAGCTCTGCTGTGCAGTGGGTGCGACAGGCTCGTGGACAACG
CCTTGAGTGGATAGGATGGATCGTCGTTGGCAGTGGTAACACAAACTACGCACAGAAGTTCCAGGA
AAGAGTCACCATTACCAGGGACATGTCCACAAGCACAGCCTACATGGAGCTGAGCAGCCTGAGATC
CGAGGACACGGCCGTGTATTACTGTGTGGCAGATACGGTCTACTGGGGCAGGGGAACCCTGGTCA
CCGTCTCGAGT (SEQ ID NO: 542)
> hN1S3-088
GAGGTGCAGCTGTTGGAGTCTGGGGGAGGCTTGGTACAGCCTGGGGGGTCCCTGAGACTCTCCTG
TGCAGCCTCTGGATTCACCTTTAGCAGCTATGCCATGAGCTGGGTCCGCCAGGCTCCAGGGAAGGG
GCTGGAGTGGGTCTCAGCTATTAGTGGTAGTGGTGGTAGCACATATTACGCAGACTCCGTGAAGGG
CCGGTTCACCATCTCCAGAGACAATTCCAAGAACACGCTGTATCTGCAAATGAACAGCCTGAGAGCC
GAGGACACGGCCGTGTATTACTGTGCGACTGAGCCTCCTTTTGATATCTGGGGCCGAGGGACAATG
GTCACCGTCTCGAGT (SEQ ID NO: 543)
>hN1S3-096
GAGGTGCAGCTGGTGCAGTCTGGGGCTGAGGTGAAGAAGCCTGGGGCCTCAGTGAAGGTCTCCTG
CAAGGCTTCTGGATACAACTTCACCGGCTACTATATGCACTGGGTGCGACAGGCCCCTGGACAAGG
ACTTGAGTGGATGGGATGGATCAACCCTAACAGTGGTGGCACAAACTATGCACAGAAGTTTCAGGG
CAGGGTCACCATGACCAGGGACACGTCCATCAGCACAGCCTACATGGAGCTGAGCAGGCTGAGATC
TGACGACACGGCCGTGTATTACTGTGCGACAGACTCCTTTGACTACTGGGGGCGAGGGACCACGGT
CACCGTCTCGAGT (SEQ ID NO: 544)
> hN1S3-112
CAGGTGCAGCTGGTGCAGTCTGGGGCTGAGGTGAAGAAGCCTGGGGCCTCAGTGAAGGTCTCTTG
CAAGGCTTCTGGATACAACTTCACCGGCTACTATATGCACTGGGTGCGACAGGCCCCTGGACAAGG
GCTTGAGTGGATGGGATGGATCAACCCTAACAGTGGTGGCACAAACTATGCACAGAAGTTTCAGGG
CAGGGTCACCATGACCAGGGACACGTCCATCAGCACAGCCTACATGGAGCTGAGCAGGCTGAGATC
TGACGACACGGCCGTGTATTACTGTGCGACAGACTCCTTTGACTACTGGGGCCGGGGAACCCTGGT
CACCGTCTCGAGT (SEQ ID NO: 545)
>hN1S3-124
GAAGTGCAGCTGGTGCAGTCTGGGGCTGAGGTGAAGAAGCCTGGGGCCTCAGTGAAGGTCTCTTG
CAAGGCTTCTGGATACAACTTCACCGGCTACTATATGCACTGGGTGCGACAGGCCCCTGGACAAGG
GCTTGAGTGGATGGGATGGATCAACCCTAACAGTGGTGGCACAAACTATGCACAGAAGTTTCAGGG
CAGGGTCACCATGACCAGGGACACGTCCATCAGCACAGCCTACATGGAGCTGAGCAGGCTGAGATC
TGACGACACGGCCGTGTATTACTGTGCGACAGACTCCTTTGACTACTGGGGCCGAGGGACCACGGT
CACCGTCTCGAGT (SEQ ID NO: 546)
> hN1S3-127
GAAGTGCAGCTGGTGCAGTCTGGGGCTGAGGTGAAGAAGCCTGGGGCCTCAGTGAAGGTCTCCTG
CAAGGCTTCTGGATACAACTTCACCGGCTACTATATGCACTGGGTGCGACAGGCCCCTGGACAAGG
ACTTGAGTGGATGGGATGGATCAACCCTAACAGTGGTGGCACAAACTATGCACAGAAGTTTCAGGG
CAGGGTCACCATGACCAGGGACACGTCCATCAGCACAGCCTACATGGAGCTGAGCAGGCTGAGATC
TGACGACACGGCCGTGTATTACTGTGCGACAGACTCCTTTGACTACTGGGGCCAGGGAACCCTGGT
CACCGTCTCGAGT (SEQ ID NO: 547)
> hN1S3-136
CAGGTGCAGCTGCAGGAGTCGGGGGCTGAGGTGAAGAAGCCTGGGGCCTCAGTGAAGGTCTCTTG
CAAGGCTTCTGGATACAACTTCACCGGCTACTATATGCACTGGGTGCGACAGGCCCCTGGACAAGG
GCTTGAGTGGATGGGATGGATCAACCCTAACAGTGGTGGCACAAACTATGCACAGAAGTTTCAGGG
CAGGGTCACCATGACCAGGGACACGTCCATCAGCACAGCCTACATGGAGCTGAGCAGGCTGAGATC
TGACGACACGGCCGTGTATTACTGTGCGACAGACTCCTTTGACTACTGGGGGCGGGGGACCACGGT
CACCGTCTCGAGT (SEQ ID NO: 548)
> hN1S3-177
GAGGTGCAGCTGGTGCAGTCTGGGGCTGAGGTGAAGAAGCCTGGGGCCTCAGTGAAGGTCTCTTG
CAAGGCTTCTGGATACAACTTCACCGGCTACTATATGCACTGGGTGCGACAGGCCCCTGGACAAGG
GCTTGAGTGGATGGGATGGATCAACCCTAACAGTGGTGGCGCAAACTATGCACAGAAGTTTCAGGG
CAGGGTCACCATGACCAGGGACACGTCCATCAGCACAGCCTACATGGAGCTGAGCAGGCTGAGATC
TGACGACACGGCCGTGTATTACTGTGCGACAGACTCCTTTGACTACTGGGGCCGGGGAACCCTGGT
CACCGTCTCGAGT (SEQ ID NO: 549)
> hN1S3-181
CAGGTGCAGCTGGTGCAGTCTGGGGCTGAGGTGAAGAAGCCTGGGGCCTCAGTGAAGGTCTCTTG
CAAGGCTTCTGGATACAACTTCACCGGCTACTATATGCACTGGGTGCGACAGGCCCCTGGACAAGG
GCTTGAGTGGATGGGATGGATCAACCCTAACAGTGGTGGCACAAACTATGCACAGAAGTTTCAGGG
CAGGGTCACCATGACCAGGGACACGTCCATCAGCACAGCCTACATGGAGCTGAGCAGGCTGAGATC
TGACGACACGGCCGTGTATTACTGTGCGACAGACTCCTTTGACTACTGGGGCCGGGGCACCCTGGT
CACCGTCTCGAGT (SEQ ID NO: 550)
> hN1S3-182
CAGGTCCAGCTGGTACAGTCTGGAGCTGAGGTGAAGAAGCCTGGGGCCTCAGTGAAGGTCTCTTGC
AAGGCTTCTGGATACAACTTCACCGGCTACTATATGCACTGGGTGCGACAGGCCCCTGGACAAGGG
CTTGAGTGGATGGGATGGATCAACCCTAACAGTGGTGGCACAAACTATGCACAGAAGTTTCAGGGC
AGGGTCACCATGACCAGGGACACGTCCATCAGCACAGCCTACATGGAGCTGAGCAGGCTGAGATCT
GACGACACGGCCGTGTATTACTGTGCGACAGACTCCTTTGACTACTGGGGCCGAGGGACAATGGTC
ACCGTCTCGAGT (SEQ ID NO: 551)
> hN1S3-184
CAGGTCCAGCTGGTGCAGTCTGGGGCTGAGGTGAAGAAGCCTGGGGCCTCAGTGAAGGTCTCTTG
CAAGGCTTCTGGATACAACTTCACCGGCTACTATATGCACTGGGTGCGACAGGCCCCTGGACAAGG
GCTTGAGTGGATGGGATGGATCAACCCTAACAGTGGTGGCACAAACTATGCACAGAAGTTTCAGGG
CAGGGTCACCATGACCAGGGACACGTCCATCAGCACAGCCTACATGGAGCTGAGCAGGCTGAGATC
TGACGACACGGCCGTGTATTACTGTGCGACAGACTCCTTTGACTACTGGGGGAGAGGGACCACGGT
CACCGTCTCGAGT (SEQ ID NO: 552)
> hN1S3-191
CAGGTGCAGCTGGTGCAGTCTGGGGCTGAGGTGAAGAAGCCTGGGGCCTCAGTGAAGGTCTCTTG
CAAGGCTTCTGGATACAACTTCACCGGCTACTATATGCACTGGGTGCGACAGGCCCCTGGACAAGG
GCTTGAGTGGATGGGATGGATCAACCCTAACAGTGGTGGCACAAACTATGCACAGAAGTTTCAGGG
CAGGGTCACCATGACCAGGGACACGTCCATCAGCACAGCCTACATGGAGCTGAGCAGGCTGAGATC
TGACGACACGGCCGTGTATTACTGTGCGACAGACTCCTTTGACTACTGGGGCCGGGGAACCCTGGT
CACCGTCTCGAGT (SEQ ID NO: 553)
> hN1S3-002
GGGGTGCAGCTGGTGCAGTCTGGGGCTGAGGTGAAGAAGCCTGGGGCCTCAGTGAAGGTCTCCTG
CAAGGCTTCTGGATACACCTTCACCGACTACTATGTGCACTGGGTGCGACAGGCCCCGGGCCAAGG
GCCTGAGTGGATGGGATGGATCAACCCTAACAATGGAGGCACAAAGTATGCACAGAAGTTCCAGGG
CAGAGTCACCATGACCACAGACACGTCCACGAGCACCGCCTACATGGAGTTGAGGAGCCTGAGATC
TGACGACACGGCCCTATATTACTGTGCGAGAGATCTGTTACCCTATTACGGTGACTACCGGGCAGAC
AAAATTGATGATTTTGATATCTGGGGCAGGGGAACCCTGGTCACCGTCTCGAGT (SEQ ID NO: 554)
> hN1S3-006
CAGGTGCAGCTGGTGCAGTCTGGGGCTGAGGTGAAGAAGCCTGGGGCCTCAGTGAAGGTCTCCTG
CAAGGCTTCTGGATACAACTTCACCGGCTACTATATACACTGGGTGCGACAGGCCCCTGGACAAGG
GCTTGAGTGGATGGGATGGATCAACCCTAACAGTGGTGGCACAAACTATGCACAGAAGTTTCAGGG
CAGGGTCATCATGACCAGGGACACGTCCATCAGCACAGCCTACATGGAACTGAGCAGGCTGAGATC
TGACGACACGGCCGTGTATTACTGTGCGACAGACTCCTTTGACTACTGGGGCCGGGGAACCCTGGT
CACCGTCTCGAGT (SEQ ID NO: 555)
> hN1S3-030
CAGGTGCAGCTGGTGCAGTCTGGGGCTGAGGTGAAGAAGCCTGGGGCCTCAGTGAAGGTCTCTTG
CAAGGCTTCTGGATACAACTTCACCGGCTACTATATGCACTGGGTGCGACAGGCCCCTGGACAAGG
GCTTGAGTGGATGGGATGGATCAACCCTAACAGTGGTGGCACAAACTATGCACAGAAGTTTCAGGG
CAGGGTCACCATGACCAGGGACACGTCCATCAGCACAGCCTACATGGAGCTGAGCAGGCTGAGATC
TGACGACACGGCCGTGTATTACTGTGCGACAGACTCCTTTGACTACTGGGGCCAGGGGACAATGGT
CACCGTCTCGAGT (SEQ ID NO: 556)
> hN1S3-036
GAGGTGCAGCTGGTGCAGTCTGGGGCTGAGGTGAAGAAGCCTGGGGCCTCAGTGAAGGTCTCTTG
CAAGGCTTCTGGATACAACTTCACCGGCTACTATATGCACTGGGTGCGACAGGCCCCTGGACAAGG
GCTTGAGTGGATGGGATGGATCAACCCTAACAGTGGTGGCACAAACTATGCACAGAAGTTTCAGGG
CAGGGTCACCATGACCAGGGACACGTCCATCAGCACAGCCTACATGGAGCTGAGCAGGCTGAGATC
TGACGACACGGCCGTGTATTACTGTGCGACAGACTCCTTTGACTACTGGGGCAGAGGGACAATGGT
CACCGTCTCGAGT (SEQ ID NO: 557)
> hN1S3-038
GAGGTGCAGCTGGTGCAGTCTGGGGCTGAGGTGAAGAAGCCTGGGGCCTCAGTGAAGGTCTCCTG
CAAGGCTTCTGGATACAACTTCACCGGCTACTATATGCACTGGGTGCGACAGGCCCCTGGACAAGG
GCTTGAGTGGATGGGATGGATCAACCCTAACAGTGGTGGCACAAACTATGCACAGAAGTTTCAGGG
CAGGGTCATCATGACCAGGGACACGTCCATCAGCACAGCCTACATGGAACTGAGCAGGCTGACATC
TGACGACACGGCCGTGTATTACTGTGCGACAGACTCCTTTGACTACTGGGGGCGAGGGACCACGGT
CACCGTCTCGAGA (SEQ ID NO: 558)
> hN1S3-074
GAGGTGCAGCTGGTGCAGTCTGGGGCTGAGGTGAAGAAGCCTGGGGCCTCAGTGAAGGTCTCCTG
CAAGGCTTCTGGATACAACTTCACCGGCTACTATATGCACTGGGTGCGACAGGCCCCTGGACAAGG
GCTTGAGTGGATGGGATGGATCAACCCTAACAGTGGTGGCACAAACTATGCACAGAAGTTTCAGGG
CAGGGTCACCATGACCAGGGACACGTCCATCAGCACAGCCTACATGGAGCTGAGCAGGCTGAGATC
TGACGACACGGCCGTGTATTACTGTGCGACAGACTCCTTTGACTACTGGGGCCGGGGGACAATGGT
CACCGTCTCGAGT (SEQ ID NO: 559)
> hN1S3-077
GAGGTCCAGCTGGTACAGTCTGGGGCTGAGGTGAAGAAGCCTGGGGCCCCAGTGAAGGTTTCCTG
CAAGACATCTGGATACGGCTTCAGTAACTACTATATGCACTGGGTGCGACAGGCCCCTGGACAAGG
GCTTGAGTGGCTGGGAATGATCAACCCCAGTGATGGTTCTCAACACTTCGCACAGAGGTTCCGGGA
CAGAGTCTCCTTTACCAGCGACACGTCCACGAGCGCAGTCTACATGGAGCTGGCCGGCCTGAGATC
TGACGACACGGCCGTGTATTACTGTGCGAGAGAGAAAGCGAATTCGATGTACTTTGACTACTGGGG
CCAGGGAACCCTGGTCACCGTCTCGAGT (SEQ ID NO: 560)
> hN1S3-083
CAGGTACAGCTGCAGCAGTCAGGTCCAGGACTGGTGAAGCCCTCGCAGACCCTCTCACTCACCTGT
GCCATCTCCGGGGACAGTATCTCTAGCAGCAGTGCTACTTGGAACTGGATCAGACAGTCCCCATCG
AGAGGCCTTGAGTGGCTGGGAAGGACATACTACAGGTCCAAGTGGTATAATGATTATGCAGTATCTG
TGAAAAGTCGAATAACCATCGACCCTGACACATCCAAGAACCAGTTCTCCCTGCAGCTGAACTCTGT
GACTCCCGAGGACACGGCTGTGTATTACTGTGCAAGACAGCTGGGTGGTAGGATTGAATTCTGGGG
CCAAGGAACCCTGGTCACCGTCTCGAGT (SEQ ID NO: 561)
> hN1S3-087
CAGGTCCAGCTGGTACAGTCTGGGGCTGAGGTGAAGAAGCCTGGGGCCTCAGTGAGGATTTCCTG
CAAGACATCTGGATTCACCTTTACCAGCTACTTTATCCACTGGGTGCGGCAGGCCCCAGGACAAAG
GCCAGAGTGGATGGGCGTTATCAACCCAAGCCGTGGCAACGCAGACTACGCACCGAGGTTCCGTG
GCAGAGTCACCATGACCCGGGACAAGTCCACGCACACTGTTTACATGGATCTGAAGAGCCTCAGAT
CTGACGACGCGGCCATATATTACTGTGCCAGAGATCGGCTTGGTGGCCTTCTTGATTACTACGACAG
TAGTGATTCTTCGAAGAATTTTGATGCTTTTGATTTCTGGGGCCAGGGAACCCTGGTCACCGTCTCG
AGT (SEQ ID NO: 562)
> hN1S3-091
GAGGTCCAGCTGGTGCAGTCTGGGGCTGAGGTGAAGAAGCCTGGGGCCTCAGTGAAGGTCTCTTG
CAAGGCTTCTGGATACAACTTCACCGGCTACTATATGCACTGGGTGCGACAGGCCCCTGGACAAGG
GCTTGAGTGGATGGGATGGATCAACCCTAACAGTGGTGGCACAAACTATGCACAGAAGTTTCAGGG
CAGGGTCACCATGACCAGGGACACGTCCATCAGCACAGCCTACATGGAGCTGAGCAGGCTGAGATC
TGACGACACGGCCGTGTATTACTGTGCGACAGACTCCTTTGACTACTGGGGCCAAGGAACAATGGT
CACCGTCTCGAGT (SEQ ID NO: 563)
> hN1S3-092
GAGGTGCAGCTGGTGCAGTCTGGGGCTGAGGTGAAGAAGCCTGGGGCCTCAGTGAAGGTCTCTTG
CAAGGCTTCTGGATACAACTTCACCGGCTACTATATGCACTGGGTGCGACAGGCCCCTGGACAAGG
GCTTGAGTGGATGGGATGGATCAACCCTAACAGTGGTGGCACAAACTATGCACAGAAGTTTCAGGG
CAGGGTCACCATGACCAGGGACACGTCCATCAGCACAGCCTACATGGAGCTGAGCAGGCTGAGATC
TGACGACACGGCCGTGTATTACTGTGCGACAGACTCCTTTGACTACTGGGGCCAGGGCACCCTGGT
CACCGTCTCGAGT (SEQ ID NO: 564)
> hN1S3-095
GAAGTGCAGCTGGTGCAGTCTGGGGCTGAGGTGAAGAAGCCTGGGGCCTCAGTGAAGGTCTCTTG
CAAGGCTTCTGGATACAACTTCACCGGCTACTATATGCACTGGGTGCGACAGGCCCCTGGACGAGG
GCTTGAGTGGATGGGATGGATCAACCCTAACAGTGGTGGCACAAACTATGCACAGAAGTTTCAGGG
CAGGGTCACCATGACCAGGGACACGTCCATCAGCACAGCCTACATGGAGCTGAGCAGGCTGAGATC
TGACGACACGGCCGTGTATTACTGTGCGACAGACTCCTTTGACTACTGGGGCCAAGGAACCCTGGT
CACCGTCTCGAGT (SEQ ID NO: 565)
> hN1S3-107
GAGGTGCAGCTGGTGCAGTCTGGACCTGAAGTGAAGAAGCCTGGGGCCTCAGTGAAGGTCTCCTG
CAAGGCTTCTGGATACACCTTCACCGACTACTTTCTCAATTGGGTGCGACAGGCCCCTGGACAAGG
GCTTGAGTGGATTGGGTGGATCAACCCTAACACTGGTGGCACAAACTATGCACAGAACTTTCAGGG
CAGGGTCACCGTGACCAGGGACGCGTCCATCAGCACGGCCTATATGGAGCTAAGGAGCCTGACAT
CTGCCGACACGGCCATATATTATTGTGCGAGAGGGGCCTATGATTACGTGTGGGGGAGTCATCGTT
ATGTCGCTGATGCTTTCGATATCTGGGGCCAAGGCACCCTGGTCACCGTCTCGAGT (SEQ ID NO: 566)
> hN1S3-133
CAGGTCCAGCTGGTGCAGTCTGGGCCTGAGGTGAAGAAGCCTGGGACCTCAGTGAAGGTCTCCTG
CAAGGCTTCTGGATTCACCTTTACTAGCTCTGCTGTGCAGTGGGTGCGACAGGCTCGTGGACAACG
CCTTGAGTGGATAGGATGGATCGTCGTTGGCAGTGGTAACACAAACTACGCACAGAAGTTCCAGGA
AAGAGTCACCATTACCAGGGACATGTCCACAAGCACAGCCTACATGGAGCTGAGCAGCCTGAGATC
CGAGGACACGGCCGTGTATTACTGTGTGGCAGATACGGTCTACTGGGGCCAAGGCACCCTGGTCAC
CGTCTCGAGT (SEQ ID NO: 567)
> hN1S3-135
GAGGTGCAGCTGGTGCAGTCTGGGGCTGAGGTGAAGAAGCCTGGGGCCTCAGTGAAGGTCTCTTG
CAAGGCTTCTGGATACAACTTCACCGGCTACTATATGCACTGGGTGCGACAGGCCCCTGGACAAGG
GCTTGAGTGGATGGGATGGATCAACCCTAACAGTGGTGGCACAAACTATGCACAGAAGTTTCAGGG
CAGGGTCACCATGACCAGGGACACGTCCATCAGCACAGCCTACATGGAGCTGAGCAGGCTGAGATC
TGACGACACGGCCGTGTATTACTGTGCGACAGACTCCTTTGACTACTGGGGCAAAGGCACCCTGGT
CACCGTCTCGAGT (SEQ ID NO: 568)
> hN1S3-141
CAGGTCCAGCTGGTGCAGTCTGGGGCTGAGGTGAAGAAGCCTGGGGCCTCAGTGAAGGTCTCCTG
CAAGGCTTCTGGATACAACTTCACCGGCTACTATATACACTGGGTGCGACAGGCCCCTGGACAAGG
GCTTGAGTGGATGGGATGGATCAACCCTAACAGTGGTGGCACAAACTATGCACAGAAGTTTCAGGG
CAGGGTCATCATGACCAGGGACACGTCCATCAGCACAGCCTACATGGAACTGAGCAGGCTGAGATC
TGACGACACGGCCGTGTATTACTGTGCGACAGACTCCTTTGACTACTGGGGCAGAGGAACCCTGGT
CACCGTCTCGAGT (SEQ ID NO: 569)
> hN1S3-151
CAGGTGCAGCTGGTGCAATCTGGGGCTGAGGTGAAGAAGCCTGGGGCCTCAGTGAAGGTCTCTTG
CAAGGCTTCTGGATACAACTTCACCGGCTACTATATGCACTGGGTGCGACAGGCCCCTGGACAAGG
GCTTGAGTGGATGGGATGGATCAACCCTAACAGTGGTGGCACAAACTATGCACAGAAGTTTCAGGG
CAGGGTCACCATGACCAGGGACACGTCCATCAGCACAGCCTACATGGAGCTGAGCAGGCTGAGATC
TGACGACACGGCCGTGTATTACTGTGCGACAGACTCCTTTGACTACTGGGGCCGGGGAACCCTGGT
CACCGTCTCGAGT (SEQ ID NO: 570)
> hN1S3-153
CAGGTGCAGCTGCAGGAGTCGGGGGGAGGCTTGGTACAGCCTGGGGGGTCCCTGAGCCTCTCCTG
TGCAACCTCTGGATTCACCTTTGGCAATTATGTCATGAGGTGGGTCCGCCAGGCTCCAGGGAAGGG
GCTGGAGTGGGTCTCAACTATCACCGAGGGTGGTGGTGATTTTATATACTACGCAGACTCCGTGAAG
GGCCGGTTCGCCATCTCCAGGGACAATTCCAAGAGCACGGTGTATCTGCACATGAATGGCCTGAGA
GTCGAGGACACGGCCGTTTATTACTGTGCGAAATCCGGGGGCGATGATAATAGCAACTATAATTTTG
AGTATTGGGGCCAAGGCACCCTGGTCACCGTCTCGAGT (SEQ ID NO: 571)
> hN1S3-190
CAGGTCCAGCTGGTGCAGTCTGGGGCTGAGGTGAAGAAGCCTGGGGCCTCAGTGAGGATTTCCTG
CAAGACATCTGGATTCACCTTTACCAGCTACTTTATCCACTGGGTGCGGCAGGCCCCAGGACAAAG
GCCAGAGTGGATGGGCGTTATCAACCCAAGCCGTGGCAACGCAGACTACGCACCGAGGTTCCGTG
GCAGAGTCACCATGACCCGGGACAAGTCCACGCACACTGTTTACATGGATCTGAAGAGCCTCAGAT
CTGACGACGCGGCCATATATTACTGTGCCAGAGATCGGCTTGGTGGCCTTCTTGATTACTACGACAG
TAGTGATTCTTCGAAGAATTTTGATGCTTTTGATTTCTGGGGCCAAGGCACCCTGGTCACCGTCTCG
AGT (SEQ ID NO: 572)
> hN1S3-108
CAGGTGCAGCTGGTGCAGTCTGGGGCTGAGGTGAGGAAGCCTGGGGCCTCAGTGAAAGTCTCCTG
CAAGGCTTCTGGATACACATTCACCGACTACTATTTACACTGGGTGAGACAGGCCCCTGGACTGGGT
CTTGAGTGGATGGGATGGATCAACCCTAACACTGGTGGCACAGACTATGGACAGAAGTTTCAGGGC
AGGGTCACCATGACCAGGGACACGTCCATCAACACAGCCTACATGGAGCTGAGCAGCCTGAGATCT
GACGACACGGCCGTGTATTATTGTGCGAGAGGGGCCTATGATTACGTGTGGGGGAGTCATCGTTAT
GTCGCTGATGCTTTCGATATCTGGGGCCAAGGGACCACGGTCACCGTCTCCTCA (SEQ ID NO: 573)
> hN1S3-130
AAGGTCCAGCTGGTGCAGTCTGGGGCTGAGGTGAAGAAGCCTGGGGCCTCAGTGAAGGTCTCCTG
CAAGGCCTCTGGATACACTTTCACCGACTTCTATATACACTGGGTGCGACAGGCCCCTGGACAAGG
GCTTGAGTGGATGGGATGGATCAATTCCAAAAGTGGTGACACACACTATGCACAGAAGTTTCAGGGC
AGGGTCACCTTGACCAGGGACACGTCCACCGACACAGCCTACATGGAGCTGAGCAGGCTGACATCT
GACGACACGGCCGTGTATTACTGTGCGAGAGGGGCCTATGATTACGTTTGGGGGAGTTCTCGTTAT
GTCGCTGATGCTTTCGATATCTGGGGCCGGGGGACAATGGTCACCGTCTCCTCA (SEQ ID NO: 574)
>N1wc11
GAAGTGCAGCTGGTGCAGTCTGGGCCTGAGGTGAAGAAGCCTGGGACCTCAGTGAAGGTCTCCTG
CAAGGCTTCTGGATTCACCTTTACTAACTCTGCTGTGCAGTGGGTGCGACAGGCTCGTGGACAACG
CCTTGAGTGGATAGGATGGATCGTCGTTGGCAGTGGTAACATAAACTACGCACAGAAGTTCCAGGAA
AGAGTCACCATTACCAGGGACATGTCCACAAGCACAGCCTACATGGAGCTGAGCAGCCTGAAATCC
GAGGACACGGCCGTGTATTATTGTGTGGCAGATACGGTCTACTGGGGCAGAGGGACAATGGTCACC
GTCTCGAGT (SEQ ID NO: 575)
>N1wc13
CAGGTGCAGCTGGTGCAGTCTGGGGCTGAGGTGAAGAAGCCTGGGGCCTCAGTGAAGGTCTCCTG
CAAGGCTTCTGGATACAACTTCACCGGCTACTATATGCACTGGGTGCGACAGGCCCCTGGACAAGG
GCTTGAGTGGATGGGATGGATCAACCCTAACAGTGGTGGCACAAACTATGCACAGAAGTTTCAGGG
CAGGGTCACCATGACCAGGGAAACGTCCATCAGCACAGCCTACATGGAGCTGAGCAGGCTGAGATC
TGACGACACGGCCGTGTATTACTGTGCGACAGACTCCTTTGACTACTGGGGCCGGGGGACAATGGT
CACCGTCTCGAGT (SEQ ID NO: 576)
>N1wc15
CAGGTACAGCTGCAGCAGTCAGGGGCTGAGGTGAAGAAGCCTGGGGCCTCAGTGAAGGTCTCTTG
CAAGGCTTCTGGATACAACTTCACCGGCTACTATATGCACTGGGTGCGACAGGCCCCTGGACAAGG
GCTTGAGTGGATGGGATGGATCAACCCTAACAGTGGTGGCACAAACTATGCACAGAAGTTTCAGGG
CAGGGTCACCATGACCAGGGACACGTCCATCAGCACAGCCTACATGGAGCTGAGCAGGCTGAGATC
TGACGACACGGCCGTGTATTACTGTGCGACAGACTCCTTTGACTACTGGGGCCAAGGGACAATGGT
CACCGTCTCGAGT (SEQ ID NO: 577)
>N1wc16
CAGGTACAGCTGCAGCAGTCAGGGGCTGAGGTGAAGACGCCTGGGGCGTCAGTCAAGGTCTCCTG
CAAGGCTTCTGGATACACCTTCACCGACAATTATATACATTGGGTGAGACAGGCCCCTGGACAAGGG
CTTGAGTGGATGGGACGGATCAATGTTAACAGTGGTGCCACAAACTATGCACGGAAATTTCAGGGTA
GGGTCACCATGACCGGGGACACGTCCATCAGCACAGCCTACATGGACCTGAGCAGACTGAAGTCTG
ACGACACGGCCGTGTATTACTGTGCGAGAGATTTCCGCTACTCCGGTGTGGACGTCTGGGGCCAAG
GGACAATGGTCACCGTCTCGAGT (SEQ ID NO: 578)
>N1wc21
CAGGTGCAGCTGGTGGAGTCTGGGGCTGAGGTGAAGAAGCCTGGGGCCTCAGTGAAGGTCTCCTG
CAAGGCTTCTGGATACACGTTCACCGACCACTATATACAGTGGCTGCGACAGGCCCCTGGACAAGG
GCTTGAGTGGATGGGATGGATGAATCCGAAGAGTGGTGGCACAAACTATGCACAGAAGTTTCAGGG
CAGGGTCACCCTGACCAGGGACACGTCCATCAGCACAGCCTACATGGACCTGAGTGGGCTGAGATT
TGACGACACGGCCATATATTTCTGTGCGAGCGACCCGACTATACCACCTTCCCCCAACTATGACTAC
TACTACTACGCTATGGACCTCTGGGGCAAGGGCACCCTGGTCACCGTCTCGAGT (SEQ ID NO: 579)
>N1wc24
GAGGTGCAGCTGGTGGAGTCCGGCCCAGGACTGGTGAAGCCTTCGGAGACCCTGTCCCTCACCTG
CACTGTCTCTGGTGGCTCCATGACTTCTAACTTTTGGAGCTGGATCCGGCAGACCCCAGGGAAGGG
ACTGGAGTGGATTGGCTATGTCCTTTATACTGGGAGCACCAACTCCAATCCCTCCCTCAAGAGTCGA
GTCACCATGTCAGTAGACACGTCCAAGAACCAGGTCTCCCTGACCCTGAGCTCTGTGACCGCCGCA
GACACGGCCATTTACTACTGTGCGAGAGGCAATGGCTGGTACCTCCCCTGGGGCAGGGGGACAAT
GGTCACCGTCTCGAGT (SEQ ID NO: 580)
>N1wc72
GAAGTGCAGCTGGTGCAGTCTGGGGCTGAGGTGAAGAAGCCTGGGGCCTCAGTGAAGGTCTCTTG
CAAGGCTTCTGGATACAACTTCACCGGCTACTATATGCACTGGGTGCGACAGGCCCCTGGACAAGG
GCTTGAGTGGATGGGATGGATCAACCCTAACAGTGGTGGCACAAACTATGCACAGAAGTTTCAGGG
CAGGGTCACCATGACCAGGGACACGTCCATCAGCACAGCCTACATGGAGCTGAGCAGGCTGAGATC
TGACGACACGGCCGTGTATTACTGTGCGACAGACTCCTTTGACTACTGGGGCAAAGGGACAATGGT
CACCGTCTCGAGT (SEQ ID NO: 581)
>N1wc79
CAGGTACAGCTGCAGCAGTCAGGGGCTGAGGTGAAGAAGCCTGGGGCCTCAGTGAAGGTCTCCTG
CAAGGCTTCTGGATACAACTTCACCGGCTACTATATGCACTGGGTGCGACAGGCCCCTGGACAAGG
GCTTGAGTGGATGGGATGGATCAACCCTAACAGTGGTGGCACAAACTATGCACAGAAGTTTCAGGG
CAGGGTCACCATGACCAGGGACACGTCCATCAGCACAGCCTACATGGAGCTGAGCAGGCTGAGATC
TGACGACACGGCCGTGTATTACTGTGCGACAGACTCCTTTGACTACTGGGGCCAAGGGACAATGGT
CACCGTCTCGAGT (SEQ ID NO: 582)
>N1wc82
CAGGTGCAGCTGGTGCAATCTGGGGCTGAGGTGAAGAAGCCTGGGGCCTCAGTGAAGGTCTCTTG
CAAGGCTTCTGGATACAACTTCACCGGCTACTATATGCACTGGGTGCGACAGGCCCCTGGACAAGG
GCTTGAGTGGATGGGATGGATCAACCCTAACAGTGGTGGCACAAACTATGCACAGAAGTTTCAGGG
CAGGGTCACCATGACCAGGGACACGTCCATCAGCACAGCCTACATGGAGCTGAGCAGGCTGAGATC
TGACGACACGGCCGTGTATTACTGCGCGACAGACTCCTTTGACTACTGGGGCAAGGGAACCCTGGT
CACCGTCTCGAGT (SEQ ID NO: 583)
>N1wc102
CAGGTCCAGCTGGTGCAGTCTGGGGCTGAGGTGAAGAAGCCTGGGGCCCCGGTGAAGGTCTCTTG
CAAGGCTTCTGGATACAACTTCACCGGCTACTATATGCACTGGGTGCGACAGGCCCCTGGACAAGG
GCTTGAGTGGATGGGATGGATCAACCCTAACAGTGGTGGCACAAACTATGCACAGAAGTTTCAGGG
CAGGGTCGCCATGACCAGGGACACGTCCATCAGCACAGCCTACATGGAGCTGAGCAGGCTGAGAT
CTGACGACACGGCCGTGTATTACTGTGCGACAGACTCCTTTGACTACTGGGGCCAAGGGACAATGG
TCACCGTCTCGAGT (SEQ ID NO: 584)
>N1wc113
CAGATGCAGCTGGTGCAATCAGGGGCTGAGGTGAAGAGGCCTGGGGCCTCAGTTAACCTTTCCTGC
AAGGCATCTGGATACTCCTTCAGCAGATACTATATCCACTGGGTGCGACAGGCCCCTGGACAGGGA
CTTGAGTTGATGGGACGGATCAACCCTGGAGGTGGTACCACAACCTACGCACAGAAATTCCAGGGC
AGAGTCACCCTGTCCAGGGACACGTCCACGAACACCATCTTCATGGAACTGAACGGCCTCACATCT
GAAGACACGGCCATGTATTATTGTGCGAGGTCGAACTACGATATTTTGGCTGGTTATGGGCCTGATG
CTTTTGATTTCTGGGGCCAAGGGACAATGGTCACCGTCTCGAGT (SEQ ID NO: 585)
>N1wc117
CAGGTGCAGCTGGTGCAATCTGGGGCTGAGGTGAAGAAGCCTGGGGCCTCAGTGAAGGTCTCTTG
CAAGGCTTCTGGATACAACTTCACCGGCTACTATATGCACTGGGTGCGACAGGCCCCTGGACAAGG
GCTTGAGTGGATGGGATGGATCAACCCTAACAGTGGTGGCACAAACTATGCACAGAAGTTTCAGGG
CAGGGTCACCATGACCAGGGACACGTCCATCAGCACAGCCTACATGGAGCTGAGCAGGCTGAGATC
TGACGACACGGCCGTGTATTACTGTGCGACAGACTCCTTTGACTACTGGGGCCGGGGAACCCTGGT
CACCGTCTCGAGT (SEQ ID NO: 586)
>N1wc125
CAGGTACAGCTGCAGCAGTCAGGGGCTGAGGTGAAGAAACCTGGGGCCCCACTGAAGGTCTCCTG
CAAGACTTCTGGATTCACCTTCACCGGCTACTATATACACTGGGTGCGACAGGCCCCTGGACAAGG
GCTTGAGTGGATGGGACGGGTCGACCCTTACAATGGTGCCACAAACTTTGCACAGAAGTTTCAGGG
CAGAGTCACCATGACCACAGACACATCCACGAGCACAACCTACATGGAACTGATGAGCCTGAGATCT
GACGACACGGCCGTATATTACTGTGCGAGAGGGTGGGAACTTGACTCCTGGGGCCAAGGAACCCT
GGTCACCGTCTCCTCA (SEQ ID NO: 587)
>N1wc127
CAGGTGCAGCTGGTGCAGTCTGGGGCTGAGGTGAAGAAGCCTGGGGCCTCAGTGAAGGTCTCCTG
CAAGGCTTCTGGATACAACTTCACCGGCTACTATATGCACTGGGTGCGACAGGCCCCTGGACAAGG
GCTTGAGTGGATGGGATGGATCAACCCTAACAGTGGTGGCACAAACTATGCACAGAAGTTTCAGGG
CAGGGTCACCATGACCAGGGACACGTCCATCAGCACAGCCTACATGGAGCTGAGCAGGCTGAGATC
TGACGACACGGCCGTGTATTACTGTGCGACAGACTCCTTTGACTACTGGGGCCGGGGAACCCTGGT
CACCGTCTCGAGT (SEQ ID NO: 588)
>N1wc129
CAGGTGCAGCTGGTGCAGTCTGGGGCTGAGGTGAAGAAGCCTGGGGCCTCAGTGAAGGTCTCCTG
CAAGGCTTCTGGATACAATTTCACCGGCTACTATTTGCACTGGGTGCGACAGGCCCCTGGACAAGG
GCTTGAGTGGATGGGATGGATCGACCCTAACAGTGGTGGCACAGACTATGCACAGCAGTTTCAGGG
CAGGGTCACCGTGACCAGGGACACGTCCATCAGCACAGCCTACATGGAATTGAGCGGGCTGAGATC
TGACGACACGGCCGTGTACTACTGTGCGTCAGACTCTTTTGACCACTGGGGCCAGGGAACCCTGGT
CACCGTCTCGAGT (SEQ ID NO: 589)
>N1wc130
CAGGTACAGCTGCAGCAGTCAGGAGCTGAGGTGAAGAAGCCTGGGGCCTCAGTGAAGGTCTCCTG
CAAGGCTTCTGGATACAACTTCACCGGCTACTATATGCACTGGGTGCGACAGGCCCCTGGACAAGG
GCTTGAGTGGATGGGATGGATCAACCCTAACAGTGGTGGCACAAACTATGCACAGAAGTTTCAGGG
CAGGGTCACCATGACCAGGGACACGTCCATCAGCACAGCCTACATGGAGCTGAGCAGGCTGAGAC
CTGACGACACGGCCGTGTATTACTGTGCGACAGACTCCTTTGACTACTGGGGCAAAGGGACAATGG
TCACCGTCTCGAGT (SEQ ID NO: 590)
>N1wc131
GAGGTCCAGCTGGTACAGTCTGGAGCTGAGGCGAAGAAGCCTGGGGCCTCAGTGAAGGTCTCCTG
CAAGGCTTCTGGATACAACTTCACCGGCTACTATATGCACTGGGTGCGACAGGCCCCTGGACAAGG
ACTTGAGTGGATGGGATGGATCAACCCTAACAGTGGTGGCACAAACTATGCACAGAAGTTTCAGGG
CAGGGTCACCATGACCAGGGACACGTCCATCAGCACAGCCTACATGGAGCTGAGCAGGCTGAGATC
TGACGACACGGCCGTGTATTACTGTGCGACAGACTCCTTTGACTACTGGGGCCAAGGCACCCTGGT
CACCGTCTCGAGT (SEQ ID NO: 591)
>N1wc132
CAGGTCCAGCTGGTACAGTCTGGAGCTGAGGTGAAGAAGCCTGGGGCCTCAGTGAAGGTCTCCTG
CAAGGCTTCTGGATACAATTTCACCGGCTACTATTTGCACTGGGTGCGACAGGCCCCTGGACAAGG
GCTTGAGTGGATGGGATGGATCAACCCTAACAGTGGTGGCACAGACTATGCACAGAAGTTTCAGGG
CAGGGTCACCGTGACCAGGGACACGTCCATCAGCACAGCCTACATGGAACTGGGCGGGCTGAGAT
CTGACGACACGGCCGTGTACTACTGTGTGTCCGACTCTTTTGACCACTGGGGCCGGGGCACCCTGG
TCACCGTCTCGAGT (SEQ ID NO: 592)
>N1wc135
CAGGTCCAGCTGGTGCAGTCTGGGGCTGAGGTGAAGAAGCCTGGGGCCTCAGTGAAGGTCTCCTG
CAAGGCTTCTGGATACAACTTCACCGGCTACTATATGCACTGGGTGCGACAGGCCCCTGGACAAGG
GCTTGAGTGGATGGGATGGATCAACCCTAACAGTGGTGGCACAAACTATGCACAGAAGTTTCAGGG
CAGGGTCACCATGACCAGGGACACGTCCATCAGCACAGCCTACATGGAGCTGAGCAGGCTGAGATC
TGACGACACGGCCGTGTATTACTGTGCGACAGACTCCTTTGACTACTGGGGCCAGGGCACCCTGGT
CACCGTCTCGAGT (SEQ ID NO: 593)
>N1wc150
GAAGTGCAGCTGGTGCAGTCTGGGGCTGAGGTGAAGAAGCCTGGGGCCTCAGTGAAGGTCTCCTG
CAAGGCTTCTGGATACAACTTCACCGGCTACTATATGCACTGGGTGCGACAGGCCCCTGGACAAGG
ACTTGAGTGGATGGGATGGATCAACCCTAACAGTGGTGGCACAAACTATGCACAGAAGTTTCAGGG
CAGGGTCACCATGACCAGGGACACGTCCATCAGCACAGCCTATATGGAGCTGAGCAGGCTGAGATC
TGACGACACGGCCGTGTATTACTGTGCGACAGACTCCTTTGACTACTGGGGCCGGGGGACAATGGT
CACCGTCTCGAGT (SEQ ID NO: 594)
>N1wc164
CAGGTGCAGCTGGTGCAGTCTGGGGCTGACGTGAAGAAGCCTGGGGCCTCAGTGAAAATTTCCTGC
AAGGCATCTGGATACACCTTCACCAAGTACTATATGCACTGGGTGCGACAGGCCCCTGGACAAGGA
CTTGAGTGGATGGGAATAATCAACCCTACTAATGGTTACACAAGCTACGCACAGAAGTTCCAGGGCA
GAGTCACCATGACCAGTGACACGTCCGCGAGCACAGTCTCCATGGAGCTGAGCAGCCTGAGATCTG
AAGACACGGCCGTGTATTACTGTACGAGATCTTACAGTAACTACGATTCTTTTGATATCTGGGGCAG
GGGGACAATGGTCACCGTCTCGAGT (SEQ ID NO: 595)
>N1wc170
CAGGTACAGCTGCAGCAGTCAGGACCTGAGGTGAAGAAGCCTGGGGCCTCAGTGAAAATCTCCTGC
AAGACTTCTGGTTATACCTTTAGCAGTTTCGGCATCAGTTGGGTGCGACAGGCCCCTGGACAAGGG
CCTGAGTGGATGGGATGGGTCAGTCCTTACAGTGGTGACACGGACTATGCACAGAAGTTCCGGGGC
AGAGTCACCATGACCATAGACTCATCCACGGACACAGCCTACGTGGAGATGAGGAGCCTGAGGTCT
GACGACACGGCCATATATTATTGTGCGAATTCACCTATCTCTGATGGCAGTTCGTCCTCGTATGACAA
CTGGGGCAAAGGCACCCTGGTCACCGTCTCGAGT (SEQ ID NO: 596)
>N1wc177
CAGGTGCAGCTGGTGCAGTCTGGGGCTGAGGTGAAGGAGCCTGGGTCCTCGGTGAGGGTCTCCTG
TAAGTCTTCTGGAGGAACCTTCAGCAATTATGCAATCAGCTGGGTGCGACAGGCCCCTGGACAAGG
GCTTGAGTGGATGGGAGGGATCATCCCAGGCTTTGGGAAAACAAATTACGCACAGAAGTTCCAGGG
CAGAGTCACGATCACCGCGGACGCATCCACGAGTACAACCTACATGGAACTGCGCACCTTAAGATC
TGGCGACACGGCCGTATACTACTGTGCGAGAGATCGGGGCCCCGATATAGGAGTGGCTCATTTTGA
CTCCTGGGGCAAGGGGACAATGGTCACCGTCTCGAGT (SEQ ID NO: 597)
>N1wc182
CAGGTCCAGCTGGTGCAGTCTGGGCCTGAGGTGAAGAAGCCTGGGACCTCAGTGAAGGTCTCCTG
CAAGGCTTCTGGATTCACCTTTACTAGCTCTGCTGTGCAGTGGGTGCGACAGGCTCGTGGACAACG
CCTTGAGTGGATAGGATGGATCGTCGTTGGCAGTGGTAACACAAACTACGCACAGAAGTTCCAGGA
AAGAGTCACCATTACCAGGGACATGTCCACAAGCACAGCCTACATGGAGCTGAGCAGCCTGAGATC
CGAGGACACGGCCGTGTATTACTGTGTGGCAGATACGGTCTACTGGGGCCAAGGCACCCTGGTCAC
CGTCTCGAGT (SEQ ID NO: 598)
>N1wc197
GAGGTGCAGCTGGTGCAGTCTGGGGCTGAGGTGAAGAAGCCTGGGGCCTCAGTGAAGGTCTCCTG
CAAGGCTTCTGGATACAACTTCACCGGCTACTATATGCACTGGGTGCGACAGGCCCCTGGACAAGG
GCTTGAGTGGATGGGATGGATCAACCCTAACAGTGGTGGCACAAACTATGCACAGAAGTTTCAGGG
CAGGGTCACCATGACCAGGGACACGTCCATCAGCACAGCCTACATGGAGCTGAGCAGGCTGAGATC
TGACGACACGGCCGTGTATTACTGTGCGACAGACTCCTTTGACTACTGGGGCCGAGGAACCCTGGT
CACCGTCTCGAGT (SEQ ID NO: 599)
>N1wc225
CAGGTACAGCTGCAGCAGTCAGGGGCTGAGGTGAAGAAGCCTGGGGCCTCAGTGAAGGTCTCCTG
CAAGGCTTCTGGATACAACTTCACCGGCTACTATATGCACTGGGTGCGACAGGCCCCTGGACAAGG
GCTTGAGTGGATGGGATGGATCAACCCTAACAGTGGTGGCACAAACTATGCACAGAAGTTTCAGGG
CAGGGTCACCATGACCAGGGACACGTCCATCAGCACAGCCTACATGGAGCTGAGCAGGCTGAGATC
TGACGACACGGCCGTGTATTACTGTGCGACAGACTCCTTTGACTACTGGGGCCGAGGGACAATGGT
CACCGTCTCGAGT (SEQ ID NO: 600)
>N1wc239
GAGGTGCAGCTGGTGGAGTCCGGGGCTGAGGTGAAGAAGCCTGGGGCCTCAGTGAAGGTCTCCTG
CAAGGCTTCTGGATACAACTTCACCGGCTACTATATACACTGGGTGCGACAGGCCCCTGGACAAGG
GCTTGAGTGGATGGGATGGATCAACCCTAACAGTGGTGGCACAAACTATGCACAGAAGTTTCAGGG
CAGGGTCATCATGACCAGGGACACGTCCATCAGCACAGCCTACATGGAACTGAGCAGGCTGAGATC
TGACGACACGGCCGTGTATTACTGTGCGACAGACTCCTTTGACTACTGGGGCAAGGGGACAATGGT
CACCGTCTCGAGT (SEQ ID NO: 601)
>N1wc241
GAGGTCCAGCTGGTGCAGTCTGGAGCGGAGGTGAAGAAGCCTGGGGCCTCAGTGAAGGTCTCATG
TAAGACTTCTGGATATACCTTCAACGACTACTACCATCACTGGGTGCGGCAGGCCCCTGGACAAGG
CCTTGAGTGGATGGGATGGATCAACCCGCATACAGGTGTCGCAAACTATGCAGAGAAGTATAAGGG
CAGGCTCGCCATGACCGGGGACACGTCCATCAGTACAATTTACATGGACCTGAGTAGTCTCATTTCT
GACGACACGGCCATATATTTCTGTGCGAGAGAGAGGTCAGAGTGGAGGAACACAGTGTCGTCTCCC
TCTGAATACTTCCACCACTGGGGCAAGGGAACCCTGGTCACCGTCTCGAGT (SEQ ID NO: 602)
>N1wc248
GAGGTGCAGCTGGTGCAGTCTGGGGCTGAGGTGAAGAAGCCTGGGGCCTCAGTGAAGGTCTCCTG
CAAGGCTTCTGGATACAACTTCACCGGCTACTATATGCACTGGGTGCGACAGGCCCCTGGACAAGG
GCTTGAGTGGATGGGATGGATCAACCCTAACAGTGGTGGCACAAACTATGCACAGAAGTTTCAGGG
CAGGGTCACCATGACCAGGGACACGTCCATCAGCACAGCCTACATGGAGCTGAGCAGGCTGAGATC
TGACGACTCGGCCGTGTATTACTGTGCGACAGACTCCTTTGACTACTGGGGCCGAGGAACCCTGGT
CACCGTCTCGAGT (SEQ ID NO: 603)
>N1wc266
CAGGTGCAGCTGGTGCAGTCTGGGGCTGAGGTGAAGAAGCCTGGGGCCTCAGTGAAGGTCTCTTG
CAAGGCTTCTGGATACAACTTCACCGGCTACTATATGCACTGGGTGCGACAGGCCCCTGGACAAGG
GCTTGAGTGGATGGGATGGATCAACCCTAACAGTGGTGGCACAAACTATGCACAGAAGTTTCAGGG
CAGGGTCACCATGACCAGGGACACGTCCATCAGCACAGCCTACATGGAGCTGAGCAGGCTGAGATC
TGACGACACGGCCGTGTATTACTGTGCGACAGACTCCTTTGACTACTGGGGCCAGGGGACAATGGT
CACCGTCTCGAGT (SEQ ID NO: 604)
>N1wc281
CAGGTGCAGCTGCAGGAGTCGGGGGCTGAGGTGAAGAAGCCTGGGGCCTCCGTGAAGGTTTCCTG
CAGGGCATCTGGATACACCTTCACCACTAACTCTCTGCACTGGGTGCGACAGGCCCCTGGACAAGG
ACTTGACTGGATGGGAGTCATCAACCCCAGGGACGGTAGCGCAACCGTCGCACAGAAATTCCAGGG
CAGGATCACCATGACCAGTGACACGTCAACGAGCACAGTCTTCTTGGCGCTGAGCAGCCTGACATC
TGACGACACGGGCGTATATTTCTGTGCGAGAGATGGCCTGGATTACCGTGATACAAGTCGAATCCTT
GCCCCGACTGATGTCTGGGGCAGAGGCACCCTGGTCACCGTCTCGAGT (SEQ ID NO: 605)
>N1wc289
CAGGTCCAGCTGGTACAGTCTGGGGCTGAGGTGAAGAAGCCTGGGACTACAGTTAAAATCTCCTGC
AAGGTTTCTGGATACAAGTTCACCGACTACTACATACACTGGGTACGACAGGCCCCAGGAAAAGGG
CTTGAGTGGATGGGATTTGTTGATCCTACAGATGATGAAACAAGATTCGCAGAGAAGTTCCAGGGCA
GACTCACCATGACCGCGGACACGTCTAGAGACACAGCCTCCATGGAACTGAGCAGCCTGAGATCTG
AGGACACGGCCGTGTATTACTGTATAAGGGGGATCGCCGCATTGGCGGACTGGGGCCGGGGGACA
ATGGTCACCGTCTCGAGT (SEQ ID NO: 606)
>N1wc295
CAGGTACAGCTGCAGCAGTCAGGGGCTGAGGTGAAGAAGCCTGGGGCCTCAGTGAAGGTCTCCTG
CAAGGCTTCTGGATACAACTTCACCGGCTACTATATGCACTGGGTGCGACAGGCCCCTGGACAAGG
GCTTGAGTGGATGGGATGGATCAACCCTAACAGTGGTGGCACAAACTATGCACAGAACTTTCAGGG
CAGGGTCACCATGACCAGGGACACGTCTATCAGCACAGCCTACATGGAGCTGAGCAGGCTGAGATC
TGACGACACGGCCGTTTATTACTGTGCGACAGACTCCTTTGACTACTGGGGCCGGGGGACAATGGT
CACCGTCTCGAGT (SEQ ID NO: 607)
>N1wc301
CAGGTACAGCTGCAGCAGTCAGGGGCTGAGGTGAAGAAGCCTGGGGCCTCAGTGAAGGTTTCCTG
CAAGGCTTCTGGATACATCTTCGGCACCTATGCCATACATTGGGTGCGCCAGGCCCCCGGACAAAG
CCTTGAGTGGATGGGATGGATCAACGCTGGCACCGGTAACACAAAATATTCACAGAAGTTCCAGGG
CAGAGTCACCATTACCATGGACACATCCGCGACCACAGCCTACATGGAGCTGAGCAGCCTGAGATC
TGGAGATACGGCTGTGTATTACTGCACAAGAGGGGATTATTATGATAGTCGTGGTTATTACAACCGC
TTCGACTACTGGGGCAGGGGAACCCTGGTCACCGTCTCGAGT (SEQ ID NO: 608)
>N1wc319
CAGGTGCAGCTGGTGCAGTCTGGGGCTGAGGTGGAGAAGCCTGGGGCCTCAGTGAAGGTCTCTTG
CAAGGCTTCTGGATACAACTTCACCGGCTACTATATGCACTGGGTGCGACAGGCCCCTGGACAAGG
GCTTGAGTGGATGGGATGGATCAACCCTAACAGTGGTGGCACAAACTATGCACAGAAGTTTCAGGG
CAGGGTCACCATGACCAGGGACACGTCCATCAGCACAGCCTACATGGAGCTGAGCAGGCTGAGATC
TGACGACACGGCCGTGTATTACTGTGCGACAGACTCCTTTGACTACTGGGGCCGGGGAACCCTGGT
CACCGTCTCGAGT (SEQ ID NO: 609)
>N1wc336
CAGGTGCAGCTGGTGCAGTCTGGGGCTGAGGTGAAGAGGCCTGGGGCCTCAGTGAAGGTCTCTTG
CAAGGCTTCTGGATACAACTTCACCGGCTACTATATGCACTGGGTGCGACAGGCCCCTGGACAAGG
GCTTGAGTGGATGGGATGGATCAACCCTAACAGTGGTGGCACAAACTATGCACAGAAGTTTCAGGG
CAGGGTCACCATGACCAGGGACACGTCCATCAGCACAGCCTACATGGAGCTGAGCAGGCTGAGATC
TGACGACACGGCCGTGTATTACTGTGCGACAGACTCCTTTGACTACTGGGGCAAAGGAACCCTGGT
CACCGTCTCGAGT (SEQ ID NO: 610)
>N1wc338
CAGGTGCAGCTCGTGCAGTCTGGGGCTGAGGTGAAGAAGCCTGGGGCCTCAGTGAAGGTCTCTTG
CAAGGCTTCTGGATACAACTTCACCGGCTACTATATGCACTGGGTGCGACAGGCCCCTGGACAAGG
GCTTGAGTGGATGGGATGGATCAACCCTAACAGTGGTGGCACAAACTATGCACAGAAGTTTTAGGG
CAGGGTCACCATGACCAGGGACACGTCCATCAGCACAGCCTACATGGAGCTGAGCAGGCTGAGATC
TGACGACACGGCCGTGTATTACTGTGCGACAGACTCCTTTGACTACTGGGGCAAGGGAACCCTGGT
CACCGTCTCGAGT (SEQ ID NO: 611)
>N1wc403
GAGGTGCAGCTGGTGCAGTCTGGGGCTGAGGTGAAGAAGCCTGGGGCCTCAGTGAAGGTCTCTTG
CAAGGCTTCTGGATACAACTTCACCGGCTACTATATGCACTGGGTGCGACAGGCCCCTGGACAAGG
GCTTGAGTGGATGGGATGGATCAACCCTAACAGTGGTGGCACAAACTATGCACAGAAGTTTCAGGG
CAGGGTCACCATGACCAGGGACACGTCCATCAGCACAGCCTACATGGAGCTGAGCAGGCTGAGATC
TGACGACACGGCCGTGTATTACTGTGCGACAGACTCCTTTGACTACTGGGGCCGGGGAACCCTGGT
CACCGTCTCGAGT (SEQ ID NO: 612)
>N1wc441
CAGGTGCAGCTGGTGCAATCTGGGGCTGAGGTGAAGAAGCCTGGGGCCTCAGTGAAGGTCTCCTG
CAAGGCTCCTGGATACAGTTTCACCGACTACTATTTGCACTGGGTGCGACAGGCCCCTGGAATAGG
ACTTGAGTGGGTGGGATGGATCAACCCTAACAATGGTGGCACAAATTATGCACAGAAGTTTCGGGG
CAGGGTCACGATGACCAGGGACACGGCCATCAACACAGCCTACATGGACATGAGGTGGCTGAGATC
TGACGACACGGCCGTGTATTACTGTGCGACAGATGGGCCCCCGGGTACTGGCAATGCTTTTGATAT
CTGGGGCAGGGGCACCCTGGTCACCGTCTCGAGT (SEQ ID NO: 613)
>N1wc476
GAGGTGCAGCTGGTGCAGTCTGGGGCTGAGGTGAAGAAGCCTGGGGCCTCAGTGAAGGTCTCCTG
CAAGGCTTCTGGATACAACTTCACCGGCTACTATATGCACTGGGTGCGACAGGCCCCTGGACAAGG
GCTTGAGTGGATGGGATGGATCAACCCTAACAGTGGTGGCACAAACTATGCACAGAAGTTTCAGGG
CAGGGTCACCATGACCAGGGACACGTCCATCAGCACAGCCTACATGGAGCTGAGCAGGCTGAGATC
TGACGACACGGCCGTGTATTACTGTGCGACAGACTCCTTTGACTACTGGGGCCAGGGAACCCTGGT
CACCGTCTCGAGT (SEQ ID NO: 614)
>N1wc516
GAGGTGCAGCTGGTGGAGTCTGGGGCTGAGGTGAAGAAGCCTGGGGCCTCAGTGAAGGTCTCCTG
CAAGGCTTCTGGATACAACTTCACCGGCTACTATATGCACTGGGTGCGACAGGCCCCTGGACAAGG
GCTTGAGTGGATGGGATGGATCAACCCTAACAGTGGTGGCACAAACTATGCACAGAAGTTTCAGGG
CAGGGTCATCATGACCAGGGACACGTCCATCAGCACAGCCTACATGGAACTGAGCAGGCTGACATC
TGACGACACGGCCGTGTATTACTGTGCGACAGACTCCTTTGACTACTGGGGCAGGGGCACCCTGGT
CACCGTCTCGAGT (SEQ ID NO: 615)
>N1wc535
CAGGTCCAGCTGGTACAGTCTGGGGCTGAGGTGAAGAAGCCTGGGGCCTCAGTGAAGGTCTCTTG
CAAGGCTTCTGGATACAACTTCACCGGCTACTATATGCACTGGGTGCGACAGGCCCCTGGACAAGG
GCTTGAGTGGATGGGATGGATCAACCCTAACAGCGGTGGCACAAACTATGCACAGAAGTTTCAGGG
CAGGGTCACCATGACCAGGGACACGTCCATCAGCACAGCCTACATGGAGCTGAGCAGGCTGAGATC
TGACGACACGGCCGTGTATTACTGTGCGACAGACTCCTTTGACTACTGGGGCCGAGGAACCCTGGT
CACCGTCTCGAGT (SEQ ID NO: 616)
>N1wc540
GAAGTGCAGCTGGTGCAGTCTGGGGCTGAGGTGAAGAAGCCTGGGGCCTCAGTGAAGGTCTCTTG
CAAGGCTTCTGGATACAACTTCACCGGCTACTATATGCACTGGGTGCGACAGGCCCCTGGACAAGG
GCTTGAGTGGATGGGATGGATCAACCCTAACAGTGGTGGCACAAACTATGCACAGAAGTTTCAGGG
CAGGGTCACCATGACCAGGGACACGTCCATCAGCACAGCCTACATGGAGCTGAGCAGGCTGAGATC
TGACGACACGGCCGTGTATTACTGTGCGACAGACTCCTTTGACTACTGGGGCCAAGGGACAATGGT
CACCGTCTCGAGT (SEQ ID NO: 617)
>N1wc558
CAGGTCCAGCTGGTACAGTCTGGGGCTGAGGTGAAGAAGCCTGGGGCCTCAGTGAAGGTCTCCTG
CAAGGCTTCTGGATACAACTTCACCGGCTACTATATGCACTGGGTGCGACAGGCCCCTGGACAAGG
GCTTGAGTGGATGGGATGGATCAACCCTAACAGTGGTGGCACAAACTATGCACAGAAGTTTCAGGG
CAGGGTCACCATGACCAGGGACACGTCCATCAGCACAGCCTACATGGAGCTGAGCAGGCTGAGATC
TGACGACACGGCCGTGTATTACTGTGCGACAGACTCCTTTGACTACTGGGGCAGGGGCACCCTGGT
CACCGTCTCGAGT (SEQ ID NO: 618)
>N1wc570
CAGGTCCAGCTGGTGCAGTCTGGGCCTGAGGTGAAGAAGCCTGGGACCTCAGTGAAGGTCTCCTG
CAAGGCTTCTGGATTCACCTTTACTAGCTCTGCTGTGCAGTGGGTGCGACAGGCTCGTGGACAACG
CCTTGAGTGGATAGGATGGATCGTCGTTGGCAGTGGTAACACAAACTACGCACAGAAGTTCCAGGA
AAGAGTCACCATTACCAGGGACATGTCCACAAGCACAGCCTACATGGAGCTGAGCAGCCTGAGATC
CGAGGACACGGCCGTGTATTATTGTGTGGCAGATACGGTCTACTGGGGCAGAGGGACAATGGTCAC
CGTCTCGAGT (SEQ ID NO: 619)
>N1wc572
CAGGTGCAGCTGGTGCAGTCTGGAGCTGAGGTGAAGAAGCCTGGGGCCTCAGTGAAGGTCTCTTG
CAAGGCTTCTGGATACAACTTCACCGGCTACTATATGCACTGGGTGCGACAGGCCCCTGGACAAGG
GCTTGAGTGGATGGGATGGATCAACCCTAACAGTGGTGGCACAAACTATGCACAGAAGTTTCAGGG
CAGGGTCACCATGACCAGGGACACGTCCATCAGCACAGCCTACATGGAGCTGAGCAGGTTGAGATC
TGACGACACGGCCGTGTATTACTGTGCGACAGACTCCTTTGACTACTGGGGCCGAGGAACCCTGGT
CACCGTCTCGAGT (SEQ ID NO: 620)
>N1wc586
CAGGTCCAGCTGGTACAGTCTGGGCCTGAGGTGAAGAAGCCTGGGGCCTCAGTGAAGGTCTCCTG
TAAGGCAGCTGGATACACCTTTCCCGACTTCTATATGCACTGGGTGCGACAGGCCCCTGGAAAAGG
ACCTGAGTGGGTGGGATGGATCAACTCTAATAGTGGCAGCACAAGACTTGCAGAGAGACTTGAGGG
CAGGGTCACCTTGACCAGGGACACATCCATCAGCACAGCCTATATGGAGTTGACCAGCCTCACATCT
GACGACACGGCCGTCTATTATTGTGCGAGAGGGGCCTATGATTACGTCTGGGGGACTTCTCGCTAT
GTCGCTGATGCTTTCGATATCTGGGGCCAAGGAACTCTGGTCACCGTCTCCCCA (SEQ ID NO: 621)
>N1wc614
GAGGTGCAGCTGGTGCAGTCTGGGGCTGAGGTGAAGAAGCCTGGGGCCTCAGTGAAGGTCTCCTG
CAAGGCTTCTGGATACAACTTCACCGGCTACTATATGCACTGGGTGCGACAGGCCCCTGGACAAGG
GCTTGAGTGGATGGGATGGATCAACCCTAACAGTGGTGGCACAAACTATGCACAGAAGTTTCAGGG
CAGGGTCACCATGACCAGGGACACGTCCATCAGCACAGCCTACATGGAGCTGAGCAGGCTGAGATC
TGACGACACGGCCGTGTATTACTGTGCGACAGACTCCTTTGACTACTGGGGCCAAGGCACCCTGGT
CACCGTCTCGAGT (SEQ ID NO: 622)
>N1wc621
GAGGTGCAGCTGGTGCAGTCTGGGGCTGAGGTGAAGAAGCCTGGGGCCTCTGTGAAGGTCTCCTG
CAAGGCTTCTGGATACACCTTCACCGGCTACTATATACACTGGGTGCGACAGGCCCCTGGTCAAGG
GCTTGAGTGGATGGGCTGGATCAGCCCCAACAGTGGTGTCACAAACTATGCACAGAGGTTTCAGGG
CAGGGTCACCATGTCCAGGGACACGTCCATCACCACAGCCTACATGGAGCTGAACAGGCTGGGATC
TGACGACACGGCCGTGTATTACTGTGCGAGAGAAGGGCGGGAGGACGGTGTCCTCTTTGACTACTG
GGGCCGAGGAACCCTGGTCACCGTCTCGAGT (SEQ ID NO: 623)
>N1wc624
CAGGTACAGCTGCAGCAGTCAGGAGCTGAGGTGAAGAAGCCTGGGGCCTCAGTGAAGGTCTCCTG
CAAGGCTTCTGGATACAACTTCACCGGCTACTATATGCACTGGGTGCGACAGGCCCCTGGACAAGG
ACTTGAGTGGATGGGATGGATCAACCCTAACAGTGGTGGCACAAACTATGCACAGAAGTTTCAGGG
CAGGGTCACCATGACCAGGGACACGTCCATCAGCACAGCCTACATGGAGCTGAGCAGGCTGGGAT
CTGACGACACGGCCGTGTATTACTGTGCGACAGACTCCTTTGACTACTGGGGCCGAGGCACCCTGG
TCACCGTCTCGAGT (SEQ ID NO: 624)
>N1wc633
CAGGTACAGCTGCAGCAGTCAGGGGCTGAGGTGAAGAAGCCTGGGGCCTCAGTGAAGGTCTCTTG
CAAGGCTTCTGGATACAACTTCACCGGCTACTATATGCACTGGGTGCGACAGGCCCCTGGACAAGG
GCTTGAGTGGATGGGATGGATCAACCCTAACAGTGGTGGCACAAACTATGCACAGAAGTTTCAGGG
CAGGGTCACCATGACCAGGGACACGTCCATCAGCACAGCCTACATGGAGCTGAGCAGGCTGAGATC
TGACGACACGGCCGTGTATTACTGTGCGACAGACTCCTTTGACTACTGGGGCCGAGGAACCCTGGT
CACCGTCTCGAGT (SEQ ID NO: 625)
>N1wc39
GAGGTCCAGCTGGTGCAGTCTGGAGCTGAGGTGAAGAAGCCTGGGGCCTCAGTGAAGCTCTCCTG
CAAGACTTCTGGACACACCTTCACTAACTATGCTTTCCATTGGCTGCGCCAGGCCCCCGGACAAAGG
CCTGAGTGGCTGGGATGGATCAACGCTGACAATGGTAACACAAAATATTCACAGAGTTTCCAGGATA
GAGTCACCATTACCAGGGACATATCCGCGAACACAGCCTACATGGAGATGAGCAGACTGAAATCAG
AAGACACGGCTTATTATTACTGTGCGAGAGATCCCTGGAGTGGCGTCCTTGACCACTGGGGCAAAG
GAACCCTGGTCACCGTCTCGAGT (SEQ ID NO: 626)
>N1wc45
GAGGTCCAGCTGGTGCAGTCTGGAGCTGAGGTGAAGAAGCCTGGGGCCTCAGTGAAAGTCTCCTG
TAAGGCTTCTGGTTACAGCTTTCGCAGCTATGGTATCGTCTGGGTGCGACAGGCCCCTGGACAGGG
ACTTGAGTGGATGGGATGGATCAGCGCCTACAATGGTAACACAAACTATGCACAGAAGCTCCAGGG
CAGAGTCACCATGACCACAGACACATCCACGAGCACAGCCTACATGGAGCTGAGGAGCCTGAGATC
TGACGACACGGCCGTGTATTACTGTGTGAGAGGGGACCGCCATTACGATATTCTGACTGGTTACTCC
CCTGTCTGGTTCGACCCCTGGGGGAAGGGGACCACGGTCACCGTCTCGAGT (SEQ ID NO: 627)
Light Chain
> hN1S3-001
CAGTCTGTCGTGACGCAGCCGCCCTCAGCGTCTGGGACCCCCGGGCAGAGGGTCACCATCTCTTG
TTCTGGAAGCAGCTCCAACATCGGAAGTAATACTGTAAACTGGTACCAGCAGCTCCCAGGAACGGC
CCCCAAACTCCTCATCTATAGTAATAATCAGCGGCCCTCAGGGGTCCCTGACCGATTCTCTGGCTCC
AAGTCTGGCACCTCAGCCTCCCTGGCCATCAGTGGGCTCCAGTCTGAGGATGAGGCTGATTATTAC
TGTGCAGCATGGGATGACAGCCTGAATGGTTATGTCTTCGGAACTGGGACCAAGCTGACCGTCCTA
(SEQ ID NO: 628)
> hN1S3-003
CAGTCTGTGCTGACTCAGCCACCCTCAGCGTCTGGGACCCCCGGGCAGAGGGTCACCATCTCTTGT
TCTGGAAGCAGCTCCAACATCGGAAGTAATACTGTAAACTGGTACCAGCAGCTCCCAGGAACGGCC
CCCAAACTCCTCATCTATAGTAATAATCAGCGGCCCTCAGGGGTCCCTGACCGATTCTCTGGCTCCA
AGTCTGGCACCTCAGCCTCCCTGGCCATCAGTGGGCTCCAGTCTGAGGATGAGGCTGATTATTACT
GTGCAGCATGGGATGACAGCCTGAATGGTTGGGTGTTCGGCGGAGGGACCAAGCTGACCGTCCTA
(SEQ ID NO: 629)
> hN1S3-007
CAGGCTGTGCTGACTCAGCCGTCCTCCGTGTCTGGGACCCCCGGCCAGAGGGTCACCATGTCTTGT
TCTGGAGGCAGGTCCAACATCGGAAGTAATGCTGTCAACTGGTACCAACAGTTCCCAGGAACGGCC
CCCAAACTCCTCATGTATAATACTAATCAGCGGCCCTCAGGGGTCCCTGGCCGATTCTCTGGCTCCA
AGTCTGGCGCCTCAGCCTCCCTGGCCATCAGTGGCCTCCAGTCTGATGATGAGGCTGATTATTACT
GTTCGTCTTGGGATGACAGCCTCAATGGTCTGGAGTTCGGCGGAGGGACCAAGCTGACCGTCCTA
(SEQ ID NO: 630)
> hN1S3-023
CAGTCTGTCGTGACGCAGCCGCCCTCAGCGTCTGGGACCCCCGGGCAGAGGGTCACCATCTCTTG
TTCTGGAAGCAGCTCCAACATCGGAAGTAATACTGTAAACTGGTACCAGCAGCTCCCAGGAACGGC
CCTCAAACTCCTCATCTATAGTAATAATCAGCGGCCCTCAGGGGTCCCTGACCGATTCTCTGGCTCC
AAGTCTGGCACCTCAGCCTCCCTGGCCATCAGTGGGCTCCAGTCTGAGGATGAGGCTGATTATTAC
TGTGCAGCATGGGATGACAGCCTGAATGGTTATGTCTTCGGAACTGGGACCAAGCTGACCGTCCTA
(SEQ ID NO: 631)
> hN1S3-032
CAGGCTGTGCTGACTCAGCCGTCCTCAGTGTCTGGGGCCCCAGGGCAGAGGGTCACTATCTCCTGT
ACTGGGAGCAGCTCCAACATCGGGGCAGGTTATGATGTTCACTGGTACCGGCAGCTTCCAGGAACA
GCCCCCAAACTCCTCTTGTATGGTAATGACAATCGACCCTCAGGGGTCCCTGACCGATTCTCTGGCT
CCAAGTCTGGCGCCTCAGCCTCCCTGGCCATCACAGGGCTCCGGGCTGACGATGAGGCTGATTATT
ACTGCCAGTCCTATGACAGCAGCCTGAGTGGTTCGGTGTTCGGCGGAGGGACCAAGGTCACCGTC
CTA (SEQ ID NO: 632)
> hN1S3-035
CAGGCTGTGCTGACTCAGCCGTCCTCAGTGTCTGGGGCCCCAGGGCAGAGGGTCACCATCTCCTG
CACTGGGAGCAGCTCCAACATCGGGGCAGGTTATGATGTACACTGGTACCAGCAGCTTCCAGGAAC
AGCCCCCAAACTCCTCATCTATGGTAACAGCAATCGGCCCTCAGGGGTCCCTGACCGATTCTCTGG
CTCCAAGTCTGGCACCTCAGCCTCCCTGGCCATCACTGGGCTCCAGGCTGAGGATGAGGCTGATTA
TTACTGCCAGTCCTATGACAGCAGCCTGAGTGGTTCGGTATTCGGCGGAGGGACCAAGGTCACCGT
CCTA (SEQ ID NO: 633)
> hN1S3-040
CAGTCTGTGCTGACGCAGCCGCCCTCAGCGTCTGGGACCCCCGGGCAGGGGGTCACCATCTCTTG
TTCTGGAAGCAGCTCCAACATCGGAAGGAATTCTGTAAACTGGTACCAACAACTCCCAGGAACGGCC
CCCAAACTCCTCATCTATGGTGATAATCAGCGGCCCTCAGGGGTCCCTGACCGATTCTCTGGCTCCA
AGCCTGGCACCTCGGCCTCCCTGGCCATCAGTGGGCTCCAGTCTGACGATGAGGCTCATTATTACT
GTGCAGCATGGGATGACAGCCTGAATGGTTGGGTGTTCGGCGGAGGGACCAAGGTCACCGTCCTA
(SEQ ID NO: 634)
> hN1S3-053
CAGGCTGTGCTGACTCAGCCGTCCTCAGTGTCTGGGGCCCCAGGGCAGAGGGTCACCATCTCCTG
CACTGGGAGCAGGTCCAACATCGGGGCAGGTTATGATGTACACTGGTACCAGCAGCTTCCAGGAAC
AGCCCCCAAACTCCTCATCTATGGTAACAGCAATCGGCCCTCAGGGGTCCCTGACCGATTCTCTGG
CTCCAAGTCTGGCACCTCAGCCTCCCTGGCCATCACTGGGCTCCAGGCTGAGGATGAGGCTGATTA
TTACTGCCAGTCCTATGACAGCAGCCTGAGTGGTTCGGTGTTCGGCGGAGGGACCAAGCTGACCGT
CCTA (SEQ ID NO: 635)
> hN1S3-055
CAGTCTGTGCTGACTCAGCCACCCTCCGCGTCTGGGACCCCCGGCCAGAGGGTCACCATCTCTTGT
TCTGGAAGCAGCTCCAACATCGGAAGTAATACTGTAACCTGGTACCAGCAGGTCCCAGGAACGGCC
CCCAAAGTCCTCATCTATACTAATATTCAGCGGCCCTCAGGGGTCCCTGACCGATTCTCTGGCTCCA
AGTCTGGCACCTCAGCCTCCCTGGCCATCAGTGGGCTCCAGTCTGAGGATGAGAGTGATTATTTCT
GTGCAGCATGGGATGACAGCCTGAATGGTGTGGTTTTTGGCGGAGGGACCAAGCTGACCGTCCTA
(SEQ ID NO: 636)
> hN1S3-147
TCCTATGAGCTGACTCAGCCACCCTCAGCGTCTGGGACCCCCGGGCAGAGGGTCACCATCTCTTGT
TCTGGAAGCAGCTCCAACATCGGCAGTAATCCTGTAAACTGGTACCAGCACCTCCCAGGAACGGCC
CCCAAACTCCTCATCTATAGTGATAGTCAGCGGCCCTCAGGGGTCCCTGACCGATTCTCTGGCTCCA
AGTCTGGCACCTCAGCCTCCCTGGCCATCAGTGGGCTCCAGTCTGAGGATGAGGCTGATTATTACT
GTGCAACATGGGATGACAGCCTGAGTGGTTGGGTGTTCGGCGGAGGGACCAAGCTGACCGTCCTA
(SEQ ID NO: 637)
> hN1S3-082
CACGTTATACTGACTCAACCGCCCTCAGCGTCTGGGACCCCCGGGCAGAGGGTCACCATCTCTTGT
TCTGGAGGCGGCTCCAACATCGGAAGTAATACTGTAAACTGGTACCAGCACCTCCCAGGAACGGCC
CCCAAACTCCTCATCTATAATAATGATCAGCGGCCCTCAGGGGTCCCTGACCGATTCTCTGGCTCCA
AGTCTGGCACCTCAGCCTCCCTGGCCATCAGTGGGCTCCAGTCTGAGGATGAGGCTGATTATTACT
GTGCAGCATGGGATGACAGCCTGAATGGTTGGCTGTTCGGCGGAGGGACCAAGCTGACCGTCCTA
(SEQ ID NO: 638)
> hN1S3-088
CAGTCTGTGCTGACTCAGCCACCCTCAGTGTCAGGGACCCCCGGGCAGAGGGTCACCATCTCTTGT
TCTGGAAGCAGCTCCAACATCGGAAATGATGTTGTAAACTGGTACCAACAACTCCCAGGAACGGCCC
CCAAACTCCTCATCTATAATGATTATCAGCGGCCCTCAGGGGTCTCTGACCGATTCTCCGGCTCCAA
GTCTGGCACCTCAGCCTACCTGGCCATCAGTGGGCTCCAGTCTGAAGATGAGGCTGATTATCACTG
TGCAGTATGGGATGACAGCCTGGATGGTTGGGTGTTCGGCGGAGGGACCAAGCTGACCGTCCTA
(SEQ ID NO: 639)
> hN1S3-096
CAGCCTGTGCTGACTCAGCCCCCCTCAGCGTCTGGGACCCCCGGGCAGAGGGTCACCATCTCTTGT
TCTGGAAGCAGCTCCAACATCGCAAGTAATTCTGTATACTGGTACCAGCAGCTCCCAGGAACGGCC
CCCAAACTCCTCATCTATAGGAATAATCAGCGGCCCTCAGGGGTCCCTGACCGATTCTCTGGCTCCC
AGTCTGGCGCCTCAGCCTCCCTGGCCATCAGTGGGCTCCGGTCCGAGGATGAGGCTGATTATTACT
GTGCAGCATGGGATGACAACCTCTATGGTGTGGTATTCGGCGGAGGGACCAAGCTGACCGTCCTA
(SEQ ID NO: 640)
> hN1S3-112
CTGCCTGTGCTGACTCAGCCCCCCTCAGCGTCTGGGACCCCCGGGCAGAGGGTCACCATCTCTTGT
TCTGGAAGTAGCTCCAACATCGGAAATAATTATGTATATTGGTATCAACAACTCCCAGGAACGGCCC
CCAAACTCCTCATCTACAGGAATAATCAGCGGCCCTCAGGGGTCCCTGACCGATTCTCTGCCTCCAA
GTCTGGCACCTCAGCCTCCCTGGTCATCAGTGGCATCCGGTCCGAGGATGAGGCTGAATATTACTG
TGGAGGATGGGATGACAGCCTGAGTGGTCAGGTGGTTTTCGGCGGAGGGACCAAGCTGACCGTCC
TA (SEQ ID NO: 641)
> hN1S3-124
CAGGCTGTGCTGACTCAGCCGTCCTCAGCGTCTGGGACCCCCGGGCAGAGGGTCACCATCTCTTGT
TCTGGAAGCAGCTCCAACATCGGAAGTAATACTGTAAACTGGTACCAGCAGCTCCCAGGAACGGCC
CCCAAACTCCTCATCTATGCTACTAATCAGCGGCCCTCAGGGGTCCCTGACCGATTCTCTGGCTCCG
AGTCTGGCACCTCAGCCTCCCTGGCCATCAGGGGGCTCCAGTCTGAGGATGAGGCTGATTATTACT
GTGCAGCATGGGATGACAGCCTGAATGGGAAAGTATTCGGCGGAGGGACCAAGGTCACCGTCCTA
(SEQ ID NO: 642)
> hN1S3-127
CAGTCTGTGTTGACGCAGCCGCCCTCAGTGTCTGGGGCCCCCGGGCAGAGGGTCACCATCTCTTGT
TCTGGAAGCACCTCCAACATCGGAGGCAATCCTGTGACCTGGTACCAGCAATTCCCAGGAACGGCC
CCCAAACTCCTCGTCTATCGTGATAATCAGCGGCCCTCCGGGGTCGCTGACCGATTCTCTGGCTCC
AGGTCTGGCACCTCAGCCTCCCTGGCCATCAGTGGCCTCCAGTCTGAGGATGAGGCTGATTTTTAC
TGTGCATCATGGGATGACAGCCTGGGTGGTGTGGTGTTCGGCGGTGGGACCAAGCTGACCGTCCTA
(SEQ ID NO: 643)
> hN1S3-136
CAGGCTGTGCTGACTCAGCCGTCCTCAGAGTCTGGGACCCCCGGGCAGAGGGTCACCATCTCTTGT
TCTGGGACCACCTCCAACATCGGAGATAATACTGTCACCTGGTACCAGCAGCTCCCAGGAACGGCC
CCCAAACTCCTCATCTATAGTAACACTCAGCGGCCCTCAGGGGTCCCTGCCCGGTTCTCTGGCTCC
AAGTCTGGCACCTCAGCCTCCCTGGCCATCAGTGGACTCCAGTCTGGGGATGAGGCTGATTATTAC
TGTGCGGCGTGGGATGACAGTCGGAATGGTTATGTCTTCGGAACTGGGACCAAGCTGACCGTCCTA
(SEQ ID NO: 644)
> hN1S3-177
CAGGCTGTGCTGACTCAGCCGTCCTCAGCGTCTGGGACCCCCGGGCAGAGGGTCACCATCTCTTGT
TCTGGAAGCAGCTCCAACATCGGAACTAATTATGTCTACTGGTACCAGCATCTCCCAGGAATGGCCC
CCAAACTCCTCCTCTATAGTAATAATCAGCGGCCCTCAGGGGTCCCTGACCGATTCTCTGGCTCCAA
GTCTGGCCCCTCAGCCTCCCTGGCCATCAGTGGGCTCCGGTCCGAGGATGAGGCTGATTATTACTG
TGCTGCTTGGGATGACAGCCTGAGTGGTCTGGTGTTCGGCGGAGGGACCAAGCTGACCGTCCTA
(SEQ ID NO: 645)
> hN1S3-181
TCCTATGTGCTGACTCAGCCACCCTCAGCGTCTGGGACCCCCGGGCAGAGGGTCACCATCTCTTGT
TCTGGGAGCAGTCCCAACATCGGAAGTAATACTGTCAACTGGTACCAGCAACTCCCAGGAACGGCC
CCCAAACTTCTCATCTATACTAATAATCAGCGGCCCTCAGGGGTCCCTGACCGATTCTCTGGCTCCA
AGTCTGCTACCTCAGCCTCCCTGGCCATCAGTGGGCTCCAGTTTGACGATGAGGCTGATTATTTCTG
TGCAGCGTGGGACGACAGCCTTCTTGGTGTGGTCTTCGGCGGAGGGACCAAGGTCACCGTCCTA
(SEQ ID NO: 646)
> hN1S3-182
CAGGCTGTGCTGACTCAGCCGTCCTCAGTGTCCGGGGCCCCAGGGCAGAGGGTCACCATCTCCTG
CACTGGGAGCAGCTCCAACATCGGGTCACCTTATGATGTAAACTGGTACCAGCAGTTTCCAGGAACA
GCCCCCAAACTCCTCATCTATGGTAACATTAATCGGCCCTCAGGAGTCCCTGATCGATTCTCTGGCT
CCAAGTCTGGCACCTCAGCCTCCCTGGCCATCACTGGGCTCCAGGCTGAGGACGAGGCTGATTATT
ACTGCCAGACCTATGACAGCACCCTGAACGGTGCGGTTTTCGGCGGCGGGACCAAGCTGACCGTC
CTA (SEQ ID NO: 647)
> hN1S3-184
CAGTCTGTGCTGACTCAGCCACCCTCAGCGTCTGGGACCCCCGGGCAGAGGGTCACCATCTCTTGT
TCTGGAAGCAGCTCCAACATCGGAGGTAATTATGTATACTGGTACCAGCAGCTCCCAGGAACGGCC
CCCAAACTCCTCATCTATAGGAGTAATCAGCGGCCCTCAGGGGTCCCTGACCGATTCTCTGGCTCCA
AGTCTGGCACCTCAGCCTCCCTGGCCATCAGTGGGCTCCGGTCCGAGGATGAGGCTGATTATTACT
GTGCAGCATGGGATGACAGCCTGCACGGTGTGATATTCGGCGGAGGGACCAAGCTGACCGTCCTA
(SEQ ID NO: 648)
> hN1S3-191
CAGGCTGTGCTGACTCAGCCGTCCTCAGCGTCTGGGACCCCCGGGCAGAGGGTCACCATCTCTTGT
CCTGGAAGCAGCTCCAACATCGGAAGTAATACTGTAAACTGGTACCAGCAGCTCCCAGGAACGGCC
CCCAAACTCCTCATCTATACTAATAATCAGCGGCCCTCAGGGGTCCCTGACCGATTCTCTGCCTCCA
AGTCTGGCACCTCAGCCTCCCTGGCCATCAGTGGGCTCCAGTCTGAGGATGAGGCTGATTATTACT
GTGCAGCATGGGATGACAGCCTGAATGGTTATGTCTTCGGAACTGGGACCAAGCTGACCGTCCTA
(SEQ ID NO: 649)
> hN1S3-002
CAGTCTGTGCTGACTCAGCCACCCTCAGCGTCTGGGACCCCCGGGCAGAGGGTCACCATCTCTTGT
TCTGGAAGCAGCTCCAACATCGGGAGTAACACTGTAAACTGGTACCAGCGACTCCCAGGAGCGGCC
CCCCAACTCCTCATCTACAATAATGACCAGCGGCCCTCAGGGATCCCTGACCGATTCTCTGGCTCCA
AGTCTGGCACCTCGGGCTCCCTGGTCATCAGTGGGCTCCAGTCTGAAGATGAGGCTGATTACTACT
GTGCGTCATGGGATGACAGTCTGAATGGTCGGGTGTTCGGCGGAGGGACCAAGCTGACCGTCCTA
(SEQ ID NO: 650)
>hN1S3-006
CAGGCTGTGCTGACTCAGCCGTCCTCAGCGTCTGGGACCGCCGGGCAGAGGGTCACCATCTCTTG
TTCTGGAAGCAACTCCAACATCGGAAGTAATACTGTAAACTGGTACCAACAACTCCCAGGAACGACC
CCCAAACTCCTCATCTATAGTAATAATGAGCGGCCCTCAGGGGTCCCTGACCGATTCTCTGGCTCCA
AGTCTGGCACTTCAGCCTCCCTGGCCATCAGTGGGCTCCAGTCTGACGATGAAGCTGATTATTACTG
TGCAGCATGGGATGACAGCCTGAATGGTTATGTCTTCGGAACTGGGACCAAGGTCACCGTCCTA
(SEQ ID NO: 651)
> hN1S3-030
CAGTCTGTGTTGACGCAGCCGCCCTCAGCGTCTGGGACCCCCGGGCAGAGGGTCAGCATCTCTTG
TTCTGGAAGCAGCTCCAACATCGGAAGCAATTATGTTTACTGGTACCAGCAACTCCCAGGAACGGCC
CCCAAAGTCCTCGTCTATAGGAATAATCAGCGACCCTCAGGGGTCTCTGACCGCTTCTCTGGCTCCA
AGTATGGCACCTCAGCCTCCCTGGCCATCAGTGGGCTCCGGTCCGAGGATGAGGCTGATTATTACT
GTGGATCATGGGATGACAGCCTGAGTGGTGTGGTATTCGGCGGAGGGACCAAGGTCACCGTCCTA
(SEQ ID NO: 652)
> hN1S3-036
CAGTCTGTGCTGACTCAGCCACCCTCAGCGTCTGGGACCCCCGGGCAGAGGGTCACCATCTCTTGT
TCTGGAAGCAGCTCCAATATCGGAAGTAATTATGTATACTGGTACCAGCAGCTCCCAGGAACGGCCC
CCAAACTCCTCATCTATAGGAATAATCAGCGGCCCTCAGGGGTCCCTGACCGATTCTCTGGCTCCAA
GTCTGGCACCTCAGCCTCCCTGGCCATCAGTGGGCTCCGGTCCGAGGATGAGGCTGATTATTACTG
TGCAGCATGGGATGACAGCCTGAGTGGCGTGGTATTCGGCGGAGGGACCAAGGTCACCGTCCTA
(SEQ ID NO: 653)
> hN1S3-038
CAGTCTGTCGTGACGCAGCCGCCCTCAGCGTCTGGGACCCCCGGGCAGAGGGTCACCATCTCTTG
TTCTGGAAGCAGCTCCAACATCGGAAGTAATTATGTATACTGGTACCAGCAGCTCCCAGGAACGGCC
CCCAAACTCCTCATCTATAGGAATAATCAGCGGCCCTCAGGGGTCCCTGACCGATTCTCTGGCTCCA
AGTCTGGCACCTCAGCCTCCCTGGCCATCAGTGGGCTCCGGTCCGAGGATGAGGCTGATTATTACT
GTGCAGCATGGGATGACAGCCTGAGTGGTGTGGTATTCGGCGGAGGGACCAAGCTGACCGTCCTA
(SEQ ID NO: 654)
> hN1S3-074
CAGTCTGTGCTGACGCAGCCGCCCTCAGCGTCTGGGACCCCCGGGCAGAGGGTCACCATCTCTTG
TTCTGGAGGCAGTTCCAACATCGGAAGTAATACTGTAACCTGGTACCAACAACTCCCAGGAAAGGCC
CCCAAACTCCTCATTTATATCAGTGATCAGCGGCCCTCTGGGGTCCCTGACCGATTCTCTGGCTCCA
AGTCTGGCACCTCAGCCTCCCTGGCCATCAGAGGGCTCCAGTCTGAGGATGAGGCTGATTATTACT
GTGCAGCATGGGATGACAGCCTCAATGGTGCCGTCTTCGGAACTGGGACCAAGGTCACCGTCCTA
(SEQ ID NO: 655)
> hN1S3-077
CAGTCTGTCGTGACGCAGCCGCCCTCACTGTCTGCGGCCCCAGGACAAAGGGTCACCATCTCCTGC
TCTGGAAGCCACTCCAACATTGGTAACTTTTATGTGTCGTGGTACCAGCAAGTCCCAGGAGCAGCCC
CCAAACTCCTCATTTATGACAATAATGAGCGACCCTCAGGGATTCCTGACCGATTCTCTGGCTCCAA
GTCTGGCACGTCTGCCACCCTAGACATCACCGGACTCCAGACTGGGGACGAGGCCGATTATTACTG
CTCAACCTGGGATCGCAGCCTCAGTGCTTCTGTCTTCGGAAGTGGGACCAAGCTGACCGTCCTA
(SEQ ID NO: 656)
> hN1S3-083
CAGTCTGTGCTGACTCAGCCACCCTCCGCGTCCGGGTCTCCTGGACGGTCAGTCACCATCTCCTGC
ACTGGAACCAGCAGGGACGTTGGTGCTTATAACTATGTCTCCTGGTACCAACAACACCCAGGCGAA
GCCCCCAAACTCCTGATTTCTGAGGTCACTAAGCGGCCCTCAGGGGTCCCTGCTCGCTTCTCTGCC
TCCAAGTCTGGCAACACGGCCTCCCTGACCATCTCTGGACTCCAGGCTGAAGATGAGGGTGATTATT
ACTGCAGCTCATATGCAGGCAGCGACAGTTGGGTGTTCGGCGGAGGGACCAAGCTGACCGTCCTA
(SEQ ID NO: 657)
> hN1S3-087
AATTTTATGCTGACTCAGCCCCACTCTGTGTCGGAGTCTCCGGGGAAGACGGTAACCATCTCCTGCA
CCCGCAGCAGTGGCAGCATTGGCAGCAGCTACGTGCAGTGGTACCAGCAGCGCCCGGGCACTTCC
CCTGTCACCATCATCTATGAGGATAGCCAACGGCCCTCTGGGGTCCCTGATCGATTCTCTGGGTCCA
TCGACAACTCCGCCAATTCTGCCTCCCTCACCATCTCTGGACTGAAGACTGAGGACGAGGCTGACTA
CTACTGTCAGTCTTATGATGCCAACAATCGGGTGTTCGGCGGAGGGACCAAGCTGACCGTCCTA
(SEQ ID NO: 658)
> hN1S3-091
CAGTCTGTGCTGACTCAGCCACCCTCAGCGACTGGGACCCCCGGGCAGACAGTCAGCATCTCTTGC
TCTGGAGGCAACTCCAACATCGGAAGTAATTATGTTTCCTGGTATCAGCAACTCCCAGGAACGGCCC
CCAAACTCCTCATCTATAGTAATAATCAGCGGCCCTCAGGGGTCCCTGACCGATTCTCTGGCTCCAA
GTCTGGCACCTCAGCCTCCCTGGCCATCAGTGGGCTCCAGTCTGAGGATGAGGCTGATTATTACTG
TGCAGCATGGGATGACAGCCTGAATGGGCATATCTTCGGAACTGGGACCAAGCTGACCGTCCTA
(SEQ ID NO: 659)
> hN1S3-092
CAGTCTGTGTTGACGCAGCCGCCCTCAGCGTCCGGGACCCCCGGGCAGAGGGTCACCATCTCTTG
TTCTGGAAGCAGCTCCAACATCGGAGCTAATTATGTATACTGGTACCAGCAGCTCCCAGGAACGGCC
CCCAAACTCCTCATTTATAAAAATGATCAGCGGCCCTCAGGGGTCCCTGACCGATTCTCTGGCTCCA
AGTCTGGCACCTCAGCCTCCCTGGCCATCAGTGGGCTCCGGTCCGAGGATGAGGCTGATTATTACT
GTGCAGCATGGGATGACAGCCTGAGTGGTCTGGTATTCGGCGGAGGGACCAAGGTCACCGTCCTA
(SEQ ID NO: 660)
> hN1S3-095
CAGTCTGTGTTGACGCAGCCGCCCTCAGCGTCTGGGACCCCCGGACAGAGGGTCACCATCTCTTGT
TCTGGAAGCAACTCCAACATCGGAAGCAATACTGTGAACTGGTACCAACAGCTCCCAGGAACGGCC
CCCAAAGTCCTCATCTATGGTAATCTTCAGCGGCCCTCAGGGGTCCCTGACCGATTCTCTGGCTCCA
AGTCTGGCACCTCAGCCTCCCTGGCCATCAGTGGGCTCCAGTCTGAGGATGAGGCTGATTATTACT
GTGCAACTTGGGATGACAGCCTGAATGGTTTTGTCTTCGGAACTGGGACCAAGCTGACCGTCCTA
(SEQ ID NO: 661)
> hN1S3-107
CAGTCTGTGCTGACTCAGCCACCCTCAGCGTCTGGGACCCCCGGGCAGAGGGTCACCATCTCTTGT
TCTGGAAGCAGCTCCAACATCGGGAGTAACACTGTAAACTGGTACCAGCGACTCCCAGGAGCGGCC
CCCCAACTCCTCATCTACAATAATGACCAGCGGCCCTCAGGGATCCCTGACCGATTCTCTGGCTCCA
AGTCTGGCACCTCAGGCTCCCTGGTCATCAGTGGGCTCCAGTCTGAAGATGAGGCTGATTACTACT
GTGCGTCATGGGATGACAGTCTGAATGGTCGGGTGTTCGGCGGAGGGACCAAGCTGACCGTCCTA
(SEQ ID NO: 662)
> hN1S3-133
CAGTCTGTGTTGACGCAGCCGCCCTCGGTGTCTGAAGCCCCCAGGCAGAGGGTCACCATCTCCTGT
TCTGGAAGCAGCTCCAACATCGGAAATAATGCTGTAAACTGGTACCAGCAGCTCCCAGGAGAGGCT
CCCAAACTCCTCATCTATTATGATGATCTGCTGCCCTCAGGGGTCTCTGACCGATTCTCTGGCTCCA
AGTCTGGCAGTTCAGCCTCCCTGGCCATCAGTGGGCTCCAGGCTGAGGATGAGGCTGATTATTACT
GTGCTACATGGGATGACAGCCTGAATGCTTGGGTGTTCGGCGGAGGGACCAAGGTCACCGTCCTA
(SEQ ID NO: 663)
> hN1S3-135
CTGCCTGTGCTGACTCAGCCACCCTCGGTGTCTGAAGCCCCCAGGCAGAGGGTCACCATCTCCTGT
TCTGGAAGCAGCTTCAACATCGGAAATAATGCTGTAAACTGGTACCAGCAGCTCCCAGGAAAGGCTC
CCAAACTCCTCATCTATTATGATGATCTGCTGCCCTCAGGGGTCTCTGACCGATTCTCTGGCTCCAA
GTCTGGCACCTCAGCCTCCCTGGCCATCAGTGGGCTCCAGTCTGAGGATGAGGCTGATTATTACTG
TGCAGCATGGGATGACAGCCTGAATGCCGTGGTATTCGGCGGAGGGACCAAGGTCACCGTCCTA
(SEQ ID NO: 664)
> hN1S3-141
CAGTCTGTGCTGACTCAGCCACCCTCAGCGTCTGGGACCCCCGGGCAGAGGGTCACCATCTCTTGT
TCTGGAAGCTACTCCAACATCGGAAGTAATTATGTCTACTGGTACCAGCAGTTCCCAGGAACGGCCC
CCAAACTCCTCATCTATACGAATAATCAGCGGCCCTCAGGGGTCCCTGACCGATTCTCTGGCTCCAA
GTCTGGCTCCTCAGCCTCCCTTGCCATCAGTGGGCTCCGGTCCGAGGATGAGGCTGATTATTACTG
TGCAGCATGGGATGACAGTGTGGGTGTCCTGTTATTCGGCGGGGGGACCAAGCTGACCGTCCTA
(SEQ ID NO: 665)
> hN1S3-151
CAGTCTGTCGTGACGCAGCCGCCCTCAGCGTCTGGGACCCCCGGGCAGAGGGTCACCATCTCTTG
TTCTGGAAGCAGCTCCAACATCGGAAGTAATACTGTAAACTGGTACCAGCAGCTCCCAGGAACGGC
CCCCAAACTCCTCATCTATAGTAATAATCAGCGGCCCTCAGGGGTCCCTGACCGATTCTCTGGCTCC
AAGTCTGGCACCTCAGCCTCCCTGGCCATCAGTGGGCTCCAGTCTGAGGATGAGGCTGATTATTAC
TGTGCAGCATGGGATGACAGCCTGAATGGTGGGGTGTTCGGCGGAGGGACCAAGCTGACCGTCCTA
(SEQ ID NO: 666)
> hN1S3-153
CAGGCTGTGCTGACTCAGCCGTCCTCAGTGTCTGGGGCCCCCGGCCAGAGGGTCATCATCTCCTG
CACTGGAACCAGCTCCAACACCGGGGCAGGCTATTATGTTAATTGGTATCAACAACTTCCGGGAGCA
GCCCCCAAAGTCCTCATCTTTGGTAACGACAATCGGCCCTCAGGGGTCCCTGACCGGTTCTCTGGC
GCCAAGTCTGGCACCTCAGCCTCCCTGGCCATCACTGGGCTCCAGGCTGAAGATGAGGCTGACTAT
TATTGCCAGTCGTACGACCGCAGCCTGAGTGGTTGGGTCTTCGGCGGAGGGACCAAGCTGACCGT
CCTA (SEQ ID NO: 667)
> hN1S3-190
TCTTCTGAGCTGACTCAGGACCCTGCTGTGTCTGTGGCCTTGGGACAGACAGTCAGAATCACATGC
CAAGGAGACAGCCTCAGAAGCAATTATCCAAGCTGGTACCAGCAGAAGCCAGGACAGGCCCCTCTA
CTTGTCATCTATAGTGAAAACAGGCGGCCCTCAGGGATCCCGGACCGATTCTCTGCCTCCAGGTCA
GGAAACACAGCTTCCTTGACCATCACTGGGGCTCAGGCGGAAGATGAGGCTGACTATTACTGTCAC
TCCCGGGGCAGCAGTGGTAACCATAAAGTGTTCGGCGGAGGGACCCAGCTCACCGTTTTA
(SEQ ID NO: 668)
> hN1S3-108
GACATCGTGATGACCCAGTCTCCTTCCACCCTGTCTGCATCTGTAGGAGACAGAGTCACCATCACTT
GCCGGGCCAGTCAGGGTATTAGTAGCTGGTTGGCCTGGTATCAGCAGAAACCAGGGAGAGCCCCT
AAGGTCTTGATCTATAAGGCATCTACTTTAGAAAGTGGGGTCCCATCAAGGTTCAGCGGCAGTGGAT
CTGGGACAGATTTCACTCTCACCATCAGCAGTCTGCAACCTGAAGATTTTGCAACTTACTACTGTCAA
CAGAGTTACAGTACCCCGTGGACGTTCGGCCAAGGGACCAAGCTGGAGATCAAA (SEQ ID NO: 669)
> hN1S3-130
GACATCGTGATGACCCAGTCTCCTTCCACCCTGTCTGCATCTGTAGGAGACAGAGTCACCATCACTT
GCCGGGCCAGTCAGGGTATTAGTAGCTGGTTGGCCTGGTATCAGCAGAAACCAGGGAGAGCCCCT
AAGGTCTTGATCTATAAGGCATCTACTTTAGAAAGTGGGGTCCCATCAAGGTTCAGCGGCAGTGGAT
CTGGGACAGATTTCACTCTCACCATCAGCAGTCTGCAACCTGAAGATTTTGCAACTTACTACTGTCAA
CAGAGTTACAGTACCCCGTGGACGTTCGGCCAAGGGACCAAGCTGGAGATCAAA (SEQ ID NO: 670)
>N1wc11
CAGCCTGTGCTGACTCAGCCCCCCTCAGCGTCTGGGACCCCCGGGCAGAGGGTCACCATCTCTTGT
TCTGGAAGCAGCTCCAACCTCGGAATTAATACTGTAAACTGGTACCAGCAAGTCCCAGGAACGGCC
CCCAAACTCCTCATCTATAGTGATCATCAGCGGCCCTCAGGGGTCCCTGACCGATTCTCTGGCTCCA
AGTCTGCCACCTCAGCCTCCCTGGCCATCAGTGGGCTCCAGTCTGAGGATGAGGCTGATTATTACT
GTGCAGCATGGGATGACAGCCTGAATGGCTGGGTGTTCGGCGGAGGGACCAAGCTGACCGTCCTA
(SEQ ID NO: 671)
>N1wc13
CAGTCTGTGCTGACGCAGCCGCCCTCAGCGTCTGGGACCCCCGGGCAGAGGGTCACCATCCCTTG
TTCTGGAAGCAGCTCCAACATCGGAAGTAATTATGTCTACTGGTATCAGCAGCTCCCAGGAACGGCC
CCCAAACTCCTCATCTATAGGAATAATCAGCGGCCCTCAGGGGTCCCTGACCGATTCTCTGGCTCCA
AGTCTGGCACCTCAGCCTCCCTGGCCATCAGTGGACTCCGGTCCGAGGATGAGGCTGATTATTACT
GTGCAGCATGGGATGACAGCCTGAGTGGTCTGGTGTTCGGCGGAGGGACCAAGGTCACCGTCCTA
(SEQ ID NO: 672)
>N1wc15
TCCTATGTGCTGACTCAGCCACCCTCAGCGTCTGGGACCCCCGGGCAGAGGGTCACCGTCTCTTGT
TCTGGAAGCAGCTCCAGCATCGGAAGTAATACTGTAAACTGGTACCAGCAGCTCCCAGGAACGGCC
CCCAAGCTCCTCATCTATAGTAATAATCAGCGGCCCTCAGGGGTCCCTGACCGATTCTCTGGCTCCA
AGTCTGGCACCTCAGCCTCCCTGGCCATCAGTGGGCTCCAGTCTGAGGATGAGGCTGATTATTACT
GTGCAGCATGGGATGACAGCCTGAATGGTCTGGTATTCGGCGGAGGGACCAAGCTGACCGTCCTA
(SEQ ID NO: 673)
>N1wc16
CAGTCTGTGTTGACGCAGCCGCCCTCGGTGTCTGTGGCCCCAGGACAGACGGCCACACTTTCCTGT
GTGGGAGACGCCATTGAGAGAAAAAGTGTTCACTGGTACCAACAGAGGCCAGGCCAGGCCCCGGT
GCTGGTCGTCCATGATGATAGCGACCGGCCCTCAGGGATCCCTGACCGAATCTCTGGCTCCAACTC
TGGGAACACGGCCACCCTGACCATCACCAGGGTCGAAGTCGGGGATGAGGCCGACTACTTCTGTCA
GGTGTGGGACACTAGTAGTGGTCATGACGCTGTGGTCTTCGGCGGAGGGACCAAGCTGACCGTCC
TA (SEQ ID NO: 674)
>N1wc21
TCCTATGAGCTGACTCAGCCACCCTCGGTGTCAGTGTCCCCAGGACAAACGGCCAGGATCACCTGC
TCTGGAGATGCATTGCCAGACAAATATGTTCATTGGTACCAGCAGAAGTCAGGCCAGGCCCCTGTCC
TGGTCCTCTTCGACGACAGTAAGCGACCCTCCGGTATCCCTGAGAGATTCTCTGGCTCCAGCTCAG
GGACAGTGGCCACCTTGATTATCAGTGGGGCCCAGGTGGAGGATGAAGGTGACTTCTTCTGTTACT
CAACAGACAGCAGTGGTAATGAAAGGGTTTTCGGCGGAGGGACCAAGCTGACCGTCCTA
(SEQ ID NO: 675)
>N1wc24
CAGTCTGTGCTGACGCAGCCGCCCTCGGTGTCTGGGGCCCCCAGGCAGAGGGTCACCATCTCCTG
TTCTGGAAGCAGCTCCAACATCGAAAATAATATTGTAAACTGGTACCAGCAACTCCCAGGAGAGGCT
CCCAAACTCCTCATCTATTATGATAATCTGCTGCCCTCAGGGGTCTCTGACCGATTCTCTGGCTCCAA
GTCTGGCACCTCCGCCTCCCTGGCCATCAGTGGCCTCCAGTCTGGGGATGAGGCTGATTATTACTG
TGCAGCATGGGATGACAGCCTGAAGGCTGTGGTGTTCGGCGGAGGGACCAAGCTGACCGTCCTA
(SEQ ID NO: 676)
>N1wc72
CAGCCTGTGCTGACTCAGCCACCCTCAGCGTCTGGGACCCCCGGGCAGAGGGTCACCATCTCTTGT
TCTGGAAGCTACTCCAACATCGGAAGTAATTATGTCTACTGGTACCAGCAGTTCCCAGGAACGGCCC
CCAAACTCCTCATCTATACGAATAATCAGCGGCCCTCAGGGGTCCCTGACCGATTCTCTGGCTCCAA
GTCTGGCTCCTCAGCCTCCCTTGCCATCAGTGGGCTCCGGTCCGAGGATGAGGCTGATTATTACTG
TGCAGCATGGGATGACAGTGTGGGTGTCCTGTTATTCGGCGGGGGGACCAAGGTCACCGTCCTA
(SEQ ID NO: 677)
>N1wc79
CAGTCTGTGCTGACTCAGCCACCCTCAGCGTCTGGGACCCCCGGGCAGAGAGTCACCATCTCTTGT
TCTGGAAGCACCTCCAACATCGGAAAGAATACTGTAAACTGGTACCAGCAACTCCCAGCAACGGCC
CCCAAACTCCTCATCTATAGTGATAATCAGCGGCCCTCAGGGGTCCCTGACCGATTCTCTGGCTCCA
AGTCTGGCACCTCAGCCTCCCTGGCCATCAGTGGGCTCCAGTCTGAAGATGAGTCTGATTATTACTG
TGCAGCATGGGATGACAGCCTGGATGGCCTGGTATTCGGCGGAGGGACCAAGCTGACCGTCCTA
(SEQ ID NO: 678)
>N1wc82
CAGTCTGTGCTGACGCAGCCGCCCTCAGTGTCTGCGACCCCAGGACAGAAGGTCACCATCTCCTGC
TCTGGAAGCAACTCCAACATTGGGAATAATTATGTGTCCTGGTATCAACAACTCCCAGGAACAGCCC
CCAAACTTCTCATTTATGACAGTGATCAGCGACCCGCAGGGATTCCTGACCGATTCTCTGGCTCCAA
GTTAGGCACGTCAGCCACCCTGGGCATCACCGGACTCCAGACTGGGGACGAGGCCGATTATTACTG
CGCAACATGGGATGCCGGCCTGAGTGTTCTGATTTTCGGCGGAGGGACCAAGCTGACCGTCCTA
(SEQ ID NO: 679)
>N1wc102
CAGCCTGTGCTGACTCAGCCCCCCTCAGCGTCTGGGACCCCCGGGCAGAGGGTCGCCATCTCTTG
TTCTGGAAGCAGCTCCAACATCGGAAGTAATCCTGTAAACTGGTACCAACAACTCCCAGGAACGGCC
CCCAAGCTCCTCATCTATGGTGATAATCAGCGGCCCTCAGGGGTCCCTGACCGATTCTCTGGCTCC
AAGTCTGGCACCTCAGCCTCCCTGGCCGTCAGTGGGCTCCAGTCTGAGGATGAGGCTGATTATTTC
TGTGCAGCATGGGATGACAGCCTGAATGGTGTGGTCTTCGGCGGAGGGACCAAGCTGACCGTCCTA
(SEQ ID NO: 680)
>N1wc113
CAGGCTGTGCTGACTCAGCCGTCCTCAGTGTCTGGGGCCCCAGGGCAGAGGGTCACCATCTCCTG
CACTGGGAGCAGCTCCAACATCGGGGCAGGCAATGATGTACACTGGTATCGGCAGTTTCCAGGAAC
GGCCCCCAAACTCCTCATCTATGGAAATAACAAGCGGCCCTCAGGGGTCTCTGACCGATTCTCTGG
CTCCAAGTCTGGCACCTCAGCCTCCCTGGCCATCACTGGGCTCCAGGTTGAGGATGAGGCTGATTA
TTACTGCCAGTCCTATGACAGCAGCCTGGGTGGGTCGGACGTTTTCGGCGGAGGGACCAAGCTGAC
CGTCCTA (SEQ ID NO: 681)
>N1wc117
CAGTCTGTGCTGACTCAGCCACCCTCAGCGTCTGGGACCCCCGGGCAGAGGGTCACCATCTCCTGT
TCTGGAAGCAGCTCCAACATCGGAGGTAATACTGTAAACTGGTACCAGCAGCTCCCAGGAACGGCC
CCCAAACTCCTCATCTATGGTACTAATCAGCGGCCCTCAGGGGTCCCTGACCGATTCTCTGGCTCCA
AGTCTGGCACCTCAGCCTCCCTGGCCATCAGTGGGCTCCAGTCTGAGGATGAGGCTGATTATTACT
GTGCAGCATGGGATGACTTCCTGAATGGTAAGGTATTCGGCGGAGGGACCAAGCTGACCGTCCTA
(SEQ ID NO: 682)
>N1wc125
CAGTCTGTGCTGACTCAGCCTGCCTCCGTGTCTGGGTCTCCTGGACAGTCGATCACCATCTCCTGC
ACTGGAACCAGCAGTGACGTTGGTGGTTATAACTATGTCTCCTGGTACCAACAACACCCAGGCAAAG
CCCCCAAACTCATGATTTATGAGGGCAGTAAGCGGCCCTCAGGGGTTTCTAATCGCTTCTCTGGCTC
CAAGTCTGGCAACACGGCCTCCCTGACAATCTCTGGGCTCCAGGCTGAGGACGAGGCTGATTATTA
CTGCAGCTCATATACAACCAGGAGCACTCGAGTTTTCGGCGGAGGGACCAAGCTGACCGTCCTA
(SEQ ID NO: 683)
>N1wc127
TCCTATGTGCTGACTCAGCCACCCTCAACGTCTGGGGCCCCCGGGCAGAGGGTCACCATCTCTTGT
TCTGGGAGCAGCTCCAACATCGGAAGTAATGGTGTTAACTGGTACCACCACCTCCCAGGAACGGCC
CCCAAACTCCTCATCTACAGTAATTTTCATCGGCCCTCAGGGGTCCCGGACCGATTCTCTGGCTCCA
AGTCTGGCACCTCAGCCACCCTGGCCATCAGTGGGCTCCAGTCTGAGGATGAGGCTGATTATTACT
GTGCAGCATGGGATGACAGCCTGAATGATTATGTCTTCGGAGTTGGGACCAAGGTCACCGTCCTA
(SEQ ID NO: 684)
>N1wc129
CAGTCTGTGCTGACTCAGCCACCCTCAGCGTCTGGGACCCCCGGCCAGAGGGCCACCATCTCTTGT
TCTGGAAGCGGCTCCAACATCGGAAGAAATGCTGTTAACTGGTTCCAGCAGCTCCCAGGAGCGGCC
CCCAAACTCCTCATCTATAGTAATATTCACCGGCCCTCAGGGGTCCCGGACCGAATCTCTGGCTCCA
AGTCTGGCACCTCAGCCACCCTGGCCATCAGTGGGCTCCAGTCTGAGGATGAGGCTGATTATTACT
GTGCAACATGGGATGACAGCCTTAATGATTATGTCTTCGGAACTGGGACCAAGCTGACCGTCCTA
(SEQ ID NO: 685)
>N1wc130
CAGGCTGTGCTGACTCAGCCGTCCTCAGTGTCTGGGGCCCCAGGGCAGAGGGTCACCATCTCCTG
CACTGGGACCGGCTCCAACATCGGGGCAGGTTATGATGTACACTGGTACCAGCAGCTTCCAGGAAC
TGCCCCCAAACTCCTCATCTATGCTAACACCAATCGGCCCTCAGGGGTCCCTGACCGATTCTCTGGC
TCCAAGTCTGGCACCTCAGCCTCCCTGGCCATCACTGGGCTCCAGGCTGAGGATGAGGCTGATTAT
TACTGCCAGTCCTATGACAGCAGCCTGAGTGGTTCGGTGTTCGGCGGAGGGACCAAGGTCACCGTC
CTA (SEQ ID NO: 686)
>N1wc131
TCCTATGAGCTGACTCAGCCACCCTCAGCGTCTGGGACCCCCGGGCAGAGGGTCACCATCTCTTGT
TCTGGAACCAGCTCCAACATCGGAATTAATTATGTATACTGGTATCAGCAGCTCCCAAGAACGGCCC
CCAAACTCCTCATCTATTATAATAATCAACGGCCCTCAGGGGTCCCTGACCGATTCTCTGGCTCCAG
ATCTGGCACCTCAGCCTCCCTGGCCATCAGTGGGCTCCGGTCCGAGGATGAGGCTGATTATTACTG
TGCAGCATGGGATGACAGCCTGAGTGGTCTAGTCTTCGGAACTGGGACCAAGCTGACCGTCCTA
(SEQ ID NO: 687)
>N1wc132
CAGTCTGTGCTGACTCAGCCACCCTCAGCGTCTGGGACCCCCGGACAGAGGGTCACCATCTCTTGT
TCTGGAAGCAGCTCCAACATCGGAAGTAATCCTGTCAACTGGTACCAGCAGCTCCCAGGATCGGCC
CCCAAACTCCTCGTCTATAGTGATGATCAGCGGCCCTCAGGGGTCCCTGACCGATTCTCTGGCTCC
AAGTCTGGAGCCTCAGCCTCCCTGGCCATCAGTGGGCTCCAGTCTGAGGATGAGTCTGATTATTACT
GTGCAGCATGGGATGACAGCCAGAATGCTGTGGTTTTCGGCGGAGGGACCAAGGTCACCGTCCTA
(SEQ ID NO: 688)
>N1wc135
CTGCCTGTGCTGACTCAGCCACCCTCAGCGTCTGGGACCCCCGGGCAGAGGGTCATCATCTCTTGT
TCTGGAAGCAGCTCCAACATCGGAAGTAATTATGTATACTGGTACCAGCAGCTCCCAGGAACGGCC
CCCAAACTCCTCATCTATAGGAATAATCAGCGGCCCTCAGGGGTCCCTGACCGATTCTCTGGCTCCA
AGTCTGGCACCTCAGCCTCCCTGGCCATCAGTGGGCTCCGGTCCGAGGATGAGGCTGATTATCACT
GTGCAGCATGGGATGACAGCCTGAGTGGGGTGGTATTCGGCGGAGGGACCAAGCTGACCGTCCTA
(SEQ ID NO: 689)
>N1wc150
TCCTATGAGCTGACTCAGCCACCCTCAGCGTCTGGGACCCCCGGGCAGAGGGTCACCATCTCTTGT
TCTGGAAGCGGCTCCAACATCGGGAAGAATACTGTAAACTGGTATCAGCAGCTCCCAGGGGCGGCC
CCCAAACTCCTCATCTATAGTAATAATGAGCGTCCCTCAGGGGTCCCTGGCCGGTTCTCTGGCTCCA
AGTCTGGCACCTCAGCCTCCCTGGCCATCAGTGGGCTCCAGTCTGAGGATGAGACTGATTATTATTG
TGCAGCCTGGGATGACAGCCTGAATGATATGGTCTTCGGCGGAGGGACCAAGGTCACCGTCCTA
(SEQ ID NO: 690)
>N1wc164
CAGGCTGTGCTGACTCAGCCGTCCTCAGTGTCTGGGGCCCCAGGGCAGAGGATCACCATCTCCTG
CACTGGGACCAGCTCCAACATCGGGGCAGGTTATGATGTAGAGTGGTACCAGCACCTTCCAGGAAC
AGCCCCCAAACTCCTCATCTATCGTAACAGCAATCGGCCCTCAGGGGTCCCTGATCGATTCTCTGCC
TCCAAGTCTGGCACCTCAGCCTCCCTGGTCATCACTGGACTCCAGGCTGAAGATGAGGCTGATTATT
ACTGCCAGTCCTATGACACCAGGCTGAGTGATTCTGTGATTTTCGGCGGAGGGACCAAGCTGACCG
TCCTA (SEQ ID NO: 691)
>N1wc170
TCCTATGAGCTGACTCAGCCACCCTCGGTGTCAGTGGCCCCAGGGCAGACGGCCAGGATTACCTGT
GGGGGAGAAAACATTGGAACTAAAAGTGTGCACTGGTACCAGCAGAAGTCAGGCCAGGCCCCTGTG
CTAGTCATCTATGAGGACAAGAAACGACCCTCCGGGATCCCTGACAGATTCTCTGGCTCCAGCTCAG
GGACAATGGCCACCTTGACTATCACTGGGGCCCAGGTGGACGATGAAGCTGACTACTACTGTTACT
CAGCAGACAACACTGGTGATCAGAGAATGTTCGGCGGAGGGACCAAGCTGACCGTCCTA
(SEQ ID NO: 692)
>N1wc177
CAGGCTGTGCTGACTCAGCCGTCTTCAGCGTCTGGGACCCCCGGGCAGAGGGTCATCATCTCTTGT
TCTGGAAGCAGCTCCAACATCGGAAAGTACATTGTTAATTGGTATCAGCAACTCCCAGGAGCGGCCC
CCAAACTCCTCATCTATACTTATAATGAGCGGCCCTCAGGGGTCCCTGCCCGCTTCTCTGGCTCCAC
GTCTGGCACGTCAGCCTCCCTGGCCATCACTGGGCTCCAGTCTGAAGATGAGGCTGATTATTATTGT
GCATCATGGGATGACAGCCTGAATGTCGTGGTCTTCGGCGGAGGGACCAAGCTGACCGTCCTA
(SEQ ID NO: 693)
>N1wc182
CAGTCTGTCGTGACGCAGCCGCCCTCAGCGTCTGGGACCCCCGGGCAGAGGGTCACCATCTCTTG
TTCTGGAAGCAGCTCCAACATCGGAAGTAATACTGTAAACTGGTACCAGCAGCTCCCAGGAATGGCC
CCCAAACTCCTCATCTATAGTAATAATCAGCGGCCCCCAGGGGTCCCTGACCGATTCTCTGGCTCCA
AGTCTGGCACCTCAGCCTCCCTGGCCATCAGTGGGCTCCAGTCTGAGGATGAGGCTGATTATTACT
GTGCAGCATGGGATGACAGCCTGAATGGGAATTGGGTTTTCGGCGGAGGGACCAAGCTGACCGTC
CTA (SEQ ID NO: 694)
>N1wc197
CAGTCTGTGCTGACTCAGCCACCCTCAGCGTCTGGGACCCCCGGGCAGAGGGTCACCATCTCTTGT
TCTGGAAGCAGCTCCAACATCGGAAGTAATTATGTATATTGGTACCAGAAGTTCCCAGGAACGGCCC
CCAAACTCCTCATCTATACGAATAATCAGCGGCCCTCAGGGGTCCCTGACCGATTTTCTGGCTCCAA
GTCTGGCACCTCAGCCTCCCTGGCCATCAGTGGGCTCCGGTCCGAGGATGAGGCTGATTATTACTG
TGCAGCATGGGATGACAGCCTGAGTGGTGTGGTATTCGGCGGAGGGACCAAGGTCACCGTCCTA
(SEQ ID NO: 695)
>N1wc225
CAGTCTGTCGTGACGCAGCCGCCCTCAGTGTCTGGGGCCCCAGGGCAGAGGGTCACCATCTCCTG
CACTGGGAGCAGCTCCAACATCGGGGCAGGTTATGATGTACACTGGTACCAGCAGCTTCCAGGAAC
AGCCCCCAAACTCCTCATCTATGGTAACAGCAATCGGCCCTCAGGGGTCCCTGACCGATTCTCTGG
CTCCAAGTCTGGCACCTCAGCCTCCCTGGCCATCACTGGGCTCCAGGCTGAGGATGAGGCTGATTA
TTACTGCCAGTCCTATGACAGCAGCCTGAGTGGTTCGGTGTTCGGCGGAGGGACCAAGCTGACCGT
CCTA (SEQ ID NO: 696)
>N1wc239
CAGTCTGTGTTGACGCAGCCGCCCTCAGCGTCTGGGACCCCCGGGCAGAGGGTCGCCATCTCTTG
TTCTGGCAGCCACTCCAACATCAGAAGTAATGATGTTTATTGGTACCAGCAGTTTCCAGGAACGGCC
CCCAAACTCCTCATCTATAGTAATGATCAGCGGCCCTCAGGGGTCTCTGACCGATTCGCTGGCTCCA
AGTCTGGCACCTCAGCCTCCCTGGCCATCAGCGGACTCCGGTCCGAGGATGAGTCTGATTATTATT
GTGCAACATGGGATGACAGCCTGAGTGGCGTGGTCTTCGGCGGAGGGACCAAGCTGACCGTCCTA
(SEQ ID NO: 697)
>N1wc241
CAGTCTGTGCTGACTCAGCCACCCTCAGCGTCTGGGACCCCCGGGCAGAGGGTCACCATCTCTTGT
TCTGGAAGCTTCTCCAACATCGGAAGTAATAATGTATACTGGTACCAGCAGCTCGCAGGAACGGCCC
CCAAACTCCTCATCTATAGGAATAATGAGCGGCCCTCAGGGGTCCCTGACCGATTCTCTGGCTCCAA
GTCTGGCACCTCAGCCTCCCTGGCCATCAGTGGGCTCCGGTCCGAGGATGAGGCTGATTATTACTG
TGCAGTACGGGATGACAGCCTGAGTGGTCATTATGTCTTCGGATCTGGGACCAAGGTCACCGTCCTA
(SEQ ID NO: 698)
>N1wc248
CAGTCTGTGTTGACGCAGCCGCCCTCAGCGTCTGGGACCCCCGGGCAGAGGGTCACCATCTCCTG
TTCTGGAAGCAGCTCCAATATCGGAAGTAATTCTGTATACTGGTACCAGCAGTTCCCAGGAACGGCC
CCCAAACTCCTCATCTATAGGAATAATCAGCGGCCCTCAGGGGTCCCTGACCGATTCTCTGGTTCCA
AGTCTGACACCTCAGCCTCCCTGGCCATCAGTGGGCTCCGGTCCGAGGATGAGGCTGATTATTACT
GTGCAACATGGGATGACAGCCTGAGTGGTGTGGTATTCGGCGGAGGGACCAAGCTGACCGTCCTA
(SEQ ID NO: 699)
>N1wc266
CAGGCTGTGCTGACTCAGCCGTCCTCCGTGTCTGGGACCCCCGGCCAGAGGGTCACCATGTCTTGT
TCTGGAGGCAGGTCCAACATCGGAAGTAATGCTGTCAACTGGTACCAACAGTTCCCAGGAACGGCC
CCCAAACTCCTCATGTATAATACTAATCAGCGGCCCTCAGGGGTCCCTGGCCGATTCTCTGGCTCCA
AGTCTGGCGCCTCAGCCTCCCTGGCCATCAGTGGCCTCCAGTCTGATGATGAGGCTGATTATTACT
GTTCGTCTTGGGATGACAGCCTCAATGGTCTGGAGTTCGGCGGAGGGACCAAGCTGGAGATCAAA
(SEQ ID NO: 700)
>N1wc281
CAGTCTGTGCTGACTCAGCCACCCTCAGTGTCCGTGTCCCCAGGACAGACAGCCAGCATCACCTGC
TCTGGAGATAAATTGGGAGATAAATATACTTTCTGGTATCAGCAGAAGCCAGGCCAGTCCCCTGTGC
TGATCATCTATCAAGATACCAAGCGGCCCTCAGGGATCCCAGAGCGATTCTCTGGCTCCAACTCTGG
GAACACAGCCACTCTGACCATCAGCGGGACCCAGGCTATGGATGAGGCTGACTATTACTGTCAGGC
GTGGGATAGTAATACTGATCATGTGATATTCGGCGGAGGGACCAAGCTGACCGTCCTA
(SEQ ID NO: 701)
>N1wc289
CAGGCTGTGCTGACTCAGCCGTCTTCCCTCTCTGCATCTCCTGGAGCATCAGCCAGTCTCACCTGCA
CCTTGCGCAGTGACATCAATCTTGAGACCTCCAGGATTTATTGGTTTCAACAAAAGCCAGGGAGTCC
TCCCCGCTATCTCTTGAGGTACCAGTCAGACTCAGATAATAACCTGGACTCTGGAGTCCCCAGCCGC
TTCTCTGGATCCAAAGATGCTTCGGCCAACGCAGGAATTTTGCTCATCTCTGGGGTCCAGTCTGAGG
ATGAGGCTGATTATCATTGTATGATTTGGCACAGCGGCGGTTCGGTTTTCGGCGGAGGGACCAAGG
TCACCGTCCTA (SEQ ID NO: 702)
>N1wc295
CAGTCTGTGTTGACGCAGCCGCCCTCAGCGTCTGGGACCCCCGGGCAGAGGGTCACCATCTCTTGT
TCTGGAAACAGGTCCAACATCGGAAGTAATACTGTAAACTGGTACCAGCAACTCCCAGGAACGGCC
CCCAAACTCCTCATCTATAGTAATGATCAGCGGCCCTCAGGGGTCCCTGACCGATTCTCTGGCTCCA
AGTCTGGCACCTCAGCCTCCCTGACCATCAGTGGGCTCCAGTCTGACGATGAGGCTGATTTTTACTG
TGCAGCATGGGATGATAATCTGAATGGTTATGTCTTCGGAAGTGGGACCAAGGTCACCGTCCTA
(SEQ ID NO: 703)
>N1wc301
CAGTCTGTCGTGACGCAGCCGCCCTCAGCGTCTGGGACCCCCGGGCAGAGGGTCACCATCTCTTG
TTCTGGAAGCAGCTCCAACATCGGAAAGAATAATGTATACTGGTACCAGCAGCTCCCAGGAGCGGC
CCCCAAACTCCTCATCTATCGGAATCATGAGCGGGCCTCAGGGGTCCCTGACCGATTCTCTGGCTC
CAAGTCTGGCACCTCAGCCTCCCTGGCCATCAGTGGGCTCCAGTCTGAGGATGAGGCTGATTATTA
CTGTGCAGCACGGGATGACAGCCTGAACGGTTATGTCTTCGGAACTGGGACCAAGGTCACCGTCCTA
(SEQ ID NO: 704)
>N1wc319
CAGTCTGTGCTGACTCAGCCACCCTCATCATCTGGGACCCCCGGGCAGAGGGTCACCATCTCTTGT
TCTGGAAGCAGCTCCAACATCGGAAGTAACTCTGTAAACTGGTACCAACAACTCCCAGGGGCGGCC
CCCAAACTCCTCATCTATAGTGATAATCAGCGGCCCTCAGGGGTCCCTGACCGATTCTCTGCCTCCA
AGTCTTACACCTCAGCCTCCCTGGCCATCAGTGGGCTCCAGTCTGGGGATGAGGCTGATTATTTCTG
TGCAACATGGGATGACAGCCTGACTGGTCTAGTCTTCGGCGGAGGGACCAAGCTGACCGTCCTA
(SEQ ID NO: 705)
>N1wc336
CAGGCTGTGCTGACTCAGCCGTCCTCAGCGTCTGGGACCCCCGGGCAGAGGGTCACCATCTCTTGT
TCTGGAAGCTACTCCAACATCGGAAGTAATTATGTATACTGGTACCAGCAGCTCCCAGGAACGGCCC
CCAAACTCCTCATCTATACGAATAATCAGCGGCCCTCAGGGGTCCCTGACCGATTCTCTGGCTCCAA
GTCTGGCACCTCAGCCTCCCTTGTCATCAGTGGGCTCCGGTCCGACGATGAAGGTGATTATTACTGT
GCAGCATGGGATGACAGTGTGAGTGTCCTGTTATTCGGCGGGGGGACCAAGCTGACCGTCCTA
(SEQ ID NO: 706)
>N1wc338
CAGTCTGTGTTGACGCAGCCGCCCTCAGCGTCTGGGACCCCCGGGCAGAGGGTCACCATCTCTTGT
TCTGGAAGCAGTTCCAACATCGGAACTTACACTGTAAACTGGTACCAGCAGCACCCAGGAACGGCC
CCCAAGCTCCTCATCTATAGTAATGATCAGCGGCCCTCAGGGGTCCCTGATCGATTCTCTGGCTCCA
GGTCTGGCACCTCAGCCTCCCTGGCCATCAGTGGACTCCGGTCTGAGGATGAGGCTGATTATTACT
GTGCAGCATGGGATGACAGCCTACATGGCTATGTCTTCAGAACTGGGACCAAGCTGACCGTCCTA
(SEQ ID NO: 707)
>N1wc403
CAGGCTGTGCTGACTCAGCCGTCCTCAGCGTCTGGGACCCCCGGGCAGAGGGTCACCATCTCTTGT
CCTGGAAGCAGCTCCAACATCGGAAGTAATACTGTAAACTGGTACCAGCAGCTCCCAGGAACGGCC
CCCAAACTCCTCATCTATACTAATAATCAGCGGCCCTCAGGGGTCCCTGACCGATTCTCTGCCTCCA
AGTCTGGCACCTCAGCCTCCCTGGCCATCAGTGGGCTCCAGTCTGAGGATGAGGCTGATTATTACT
GTGCAGCATGGGATGACAGCCTGAATGGTTATGTCTTCGGAACTGGGACCAAGCTGACCGTCCTA
(SEQ ID NO: 708)
>N1wc441
TCCTATGAGCTGACTCAGCCACCCTCGGTGTCAGTGTCCCCAGGACAAACGGCCAGGATCACCTGC
TCTGGAGATGCATTGCCAGACAAATATGTTCATTGGTACCAGCAGAAGTCAGGCCAGGCCCCTGTCC
TGGTCCTCTTCGACGACAGTAAGCGACCCTCCGGTATCCCTGAGAGATTCTCTGGCTCCAGCTCAG
GGACAGTGGCCACCTTGATTATCAGTGGGGCCCAGGTGGAGGATGAAGGTGACTTCTTCTGTTACT
CAACAGACAGCAGTGGTAATGAAAGGGTTTTCGGCGGAGGGACCAAGCTGACCGTCCTA
(SEQ ID NO: 709)
>N1wc476
CAGGCTGTGCTGACTCAGCCGTCCTCAGTGTCTGGGACCCCCGGGCAGACGGTCACCATCTCTTGT
TCTGGCAGCAACTCCAACATCGGAAATAATTATGTATACTGGTACCAACAATTGCCAGGGTCGGCCC
CCAAAGTCGTCATCTACAGGAATCATCAGCGGCCCTCAGGGGTCCCTGACCGATTCTCTGGCTCCA
AGTCTGGCACCGCCGCCTCCCTGGCCATCAGTGGACTCCGGTCCGAAGATGAAGCTGATTATTATT
GTGCATCATGGGATGACAGCCTGAGTGGTCTGGTTTTCGGCGGGGGGACCAAGCTGACCGTCCTA
(SEQ ID NO: 710)
>N1wc516
CAGCCTGTGCTGACTCAGCCCCCCTCAGCGTCTGGGACCCCCGGGCAGAGGGTCACCATCTCTTGT
TCTGGAAGCAGCTCCAACATCGGAAGTAATACTGTAAACTGGTACCAGCAGCTCCCAGGAACGGCC
CCCAAACTCCTCATCTATAGTAATAATCAGCGGCCCTCAGGGGTCCCTGACCGATTCTCTGGCTCCA
AGTCTGGCACCTCAGCCTCCCTGGCCATCAGTGGGCTCCAGTCTGAGGATGAGGCTGATTATTACT
GTGCAGCATGGGATGACAGCCTGAATGATGTGGTATTCGGCGGAGGGACCAAGCTGACCGTCCTA
(SEQ ID NO: 711)
>N1wc535
CAGTCTGTGCTGACGCAGCCGCCCTCAGCGTCTGGGACCCCGGGGCAGAGGGTCACCCTCTCTTG
TTCTGGAAGCAGCTCCAACATCGGAAGTAATACTGTAAACTGGTACCAGCAGCTCCCAGGAACGGC
CCCCAAAGTCCTCATCTATAGTGATAATCAGCGGCCCTCAGGGGTCCCTGACCGATTCTCTGGCTCC
AAGTCTGGCACCTCAGCCTCCCTGGCCATCAGTGGGCTCCAGTCTGACGATGAGGCTGTTTATTACT
GTGCAGGTTGGGATGACAGCCTGAATGCTTATCTCTTCGGAACTGGGACCAAGGTCACCGTCCTA
(SEQ ID NO: 712)
>N1wc540
CAGGCTGTGCTGACTCAGCCGTCCTCAGCGTCTGGGACCCCCGGGCAGAGGGTCACCATCTCTTGT
TCTGGAAGCAGCTCCAACATCGGAAGTTATACCGTAAACTGGTACCAGCAGGTCCCAGGAACGGCC
CCCAAACTCCTCATCTATAGTAATAATCAGCGGCCCTCAGGGGTCCCTGAGCGATTCTCTGGCTCCA
AGTCTGGCACCTCAGCCTCCCTGGCCATCAGTGGGCTCCAGTCTGAGGATGAGGCTGATTATTACT
GTGCAGCATGGGATGACAGCCTGAGTGATGTGCTATTCGGCGGAGGGACCAAGCTGACCGTCCTA
(SEQ ID NO: 713)
>N1wc558
CTGCCTGTGCTGACTCAGCCCCCCTCAGCGTCTGGGACCCCCGGGCAGAGGGTCACCATCTCTTGT
TCTGGAAGCAGCTCCAACATCGGAAGTAATTCTGTAAACTGGTACCAGCAACTCCCCGGAACGGCC
CCCAAACTCCTCATCTATTCTAATAATCAGCGGCCCTCAGGGGTCCCTGACCGATTCTCTGGCTCCC
AGTCTGGCACCTCAGCCTCCCTGGCCATCAGTGGACTCCGGTCCGAGGATGAGGCTGATTATTACT
GTGCAGCATGGGATGACAGCCTGAATAATTTGGTGTTCGGCGGAGGGACCAAGCTGACCGTCCTA
(SEQ ID NO: 714)
>N1wc570
CAGTCTGTGCTGACGCAGCCGCCCTCAGCGTCTGCGACCCCCGGGCAGACGGTCACCATCTCTTGT
TCTGGAAGCACCTCCAACATCGGAAATAATAATGTAAACTGGTACCAGCAGGTCCCAGGAACGGCC
CCCAAACTCCTCATGTACAGTAATAATCAGCGGCCCTCAGGGGTCCCTGACCGATTCTCTGGCTCCA
GGTCTGGCACCTCAGCCTCCCTGGCCATCACTGCGCTCCAGTCTGAGGATGAGGCTGATTATTACT
GTGCAACATGGGATGACAGCCTGAGTGCTTGGGTATTCGGCGGAGGGACCAAGGTCACCGTCCTA
(SEQ ID NO: 715)
>N1wc572
CTGCCTGTGCTGACTCAGCCCCCCTCAGCGTCTGGGACCCCCGGACAGAGGGTCACCATCTCTTGT
TCTGGAAGCAGCTCCAACATCGGAAGTAATCCTGTCAACTGGTACCAGCAGCTCCCAGGATCGGCC
CCCAAACTCCTCGTCTATAGTGATGATCAGCGGCCCTCAGGGGTCCCTGACCGATTCTCTGGCTCC
AAGTCTGGAGCCTCAGCCTCCCTGGCCATCAGTGGGCTCCAGTCTGAGGATGAGTCTGATTATTACT
GTGCAGCATGGGATGACAGCCTGAATGCTGTGGTTTTCGGCGGAGGGACCAAGGTCACCGTCCTA
(SEQ ID NO: 716)
>N1wc586
GACATCGTGATGACCCAGTCTCCTTCCACCCTGTCTGCATCTGTAGGAGACAGAGTCACCATCACTT
GCCGGGCCAGTCAGGGTATTAGTAGCTGGTTGGCCTGGTATCAGCAGAAACCAGGGAGAGCCCCT
AAGGTCTTGATCTATAAGGCATCTACTTTAGAAAGTGGGGTCCCATCAAGGTTCAGCGGCAGTGGAT
CTGGGACAGATTTCACTCTCACCATCAGCAGTCTGCAACCTGAAGATTTTGCAACTTACTACTGTCAA
CAGAGTTACAGTACCCCGTGGACGTTCGGCCAAGGGACCAAGCTGGAGATCAAA (SEQ ID NO: 717)
>N1wc614
CAGTCTGTGCTGACGCAGCCGCCCTCAGCGTCTGGGACCCCCGGGCAGAGGGTCACCATATCTTG
TTCTGGAAGCAGCTCCAACATCGGAAGTAATACTGTAAACTGGTACCAGCAGCTCCCAGGAACGGC
CCCCAAACTCCTCATCTATAGTAATAATCAGCGGCCCTCAGGGGTCCCTGACCGATTCTCTGGCTCC
AAGTCTGGCACCTCAGCCTCCCTGGCCATCAGTGGGCTCCAGTCTGAGGATGAGGCTGATTATTAC
TGTGCAGCATGGGATGACAGCCTGAATGGTCTGGTGTTCGGCGGAGGGACCAAGGTCACCGTCCTA
(SEQ ID NO: 718)
>N1wc621
CAGGCTGTGCTGACTCAGCCGTCCTCAGTGTCTGGGGCCCCAGGGCAGACGGTCACCATCTCCTG
CGCTGGGAGCAGCTCCAACCTCGGGGCAGGTTATGATGCACACTGGTATCAACACCTTCCAGGAGC
AGTCCCCAGACTCCTCATTTATAATAATAGTAAACGCCCCTCAGGGGTCCCTGACCGATTCTCTGCC
TCCAAGTCCGGCTCCTCAGCCTCCCTGGCCATCACTGGGCTCCAGCCTGAGGATGAGGCTGATTAC
TACTGCCAGACCTATGACACCAGACTGAGCGGATCGATGCTATTCGGCGGAGGGACCAAGGTCACC
GTCCTA (SEQ ID NO: 719)
>N1wc624
CAGTCTGTGCTGACGCAGCCGCCCTCAGCGTCTGGGACCCCCGGGCAGGGGGTCACCATCTCTTG
TTCTGGAAGCAGCTCCAACATCGGAAGTAATACTGTAAACTGGTACCAGCAGCTCCCAGGAACGGC
CCCCAAACTCCTCATCTATAGTAATAATCAGCGGCCCTCAGGGGTCCCTGACCGATTCTCTGGCTCC
AAGTCTGGCACCTCAGCCTCCCTGGCCATCAGTGGGCTCCAGTCTGAGGATGAGGCTGATTATTAC
TGTGCTGCATGGGATGACAGCCTGAATGGTAAAGTCTTCGGAACTGGGACCAAGGTCACCGTCCTA
(SEQ ID NO: 720)
>N1wc633
CAGGCTGTGCTGACTCAGCCGTCCTCAGCGTCTGGGACCCCCGGGCAGAGGGTCACCATCTCTTGT
TCTGGAAGCAGCTCCAACATCGGAAGTTATACTGTAAACTGGTACCAGCAGGTCCCAGGAACGGCC
CCCAAACTCCTCATCTATAGTAATAATCAGCGGCCCTCAGGGGTCCCTGAGCGATTCTCTGGCTCCA
AGTCTGGCACCTCAGCCTCCCTGGCCATCAGTGGGCTCCAGTCTGAGGATGAGGCTGATTATTACT
GTGCAGCATGGGATGACAGCCTGAGTGATGTGCTATTCGGCGGAGGGACCAAGGTCACCGTCCTA
(SEQ ID NO: 721)
>N1wc39
GACATCCAGTTGACCCAGTCTCCTTCCTCCGTGTCTGCATCTATAGGCGACACAGTCACCATCACTT
GTCGGGCGAGCCAGAATATTAACAAGTGGTTAGCCTGGTATCAGCAGAAACCAGGGAAAGCCCCTT
ACCTCCTGATCTCTACTGCTTCCAATTTGCAAAGTGGGGTCCCATCAAGGTTCAGCGGCACTGGGTC
TGGGACAGCTTTCACTCTCACCATCAGCCGCGTGCAGCCTGAAGATTTTGCAAATTACTATTGTCAA
CAGGCTTTCAGTTTCCCCATCACCTTCGGCCAAGGGACACGACTGGAGATTAAA
(SEQ ID NO: 722)
>N1wc45
TCGTCTGAGCTGACTCAGGACCCTGCTGTGTCTGTGGCCTTGGGACAGACAGTCAGGATCACATGC
CAAGGAGACAGCCTCAGAAGCTATTATGCAAGCTGGTACCAGCAGAAGCCAGGACAGGCCCCTGTA
CTTGTCATCTATGGTAAAAACAACCGGCCCTCAGGGATCCCAGACCGATTCTCTGGCTCCAGCTCAG
GAAACACAGCTTCCTTGACCATCACAGGGGCTCAGGCGGAAGATGAGGCTGACTATTACTGTAACTC
CCGGGACAGCAGTGGTAACCATGTGGTATTCGGCGGAGGGACCAAGCTGACCGTCCTA
(SEQ ID NO: 723)

C. CDR (Aminoacid sequence)
Heavy Chain

| Clone Name | HC-CDR1 | HC-CDR2 | HC-CDR3 |
|---|---|---|---|
| hN1S3-001 | GYNFTGYY | INPNSGG | ATDSFDY (SEQ ID NO: 209) |
| | (SEQ ID | (SEQ ID | |
| | NO: 207) | NO: 208) | |
| hN1S3-002 | GYTFTDYY | INPNNGG | ARDLLPYYGDYRADKIDDFDI (SEQ ID |
| | (SEQ ID | (SEQ ID | NO: 725) |
| | NO: 268) | NO: 724) | |
| hN1S3-003 | GFTFTNSA | IVVGSGN | VADTVY (SEQ ID NO: 215) |
| | (SEQ ID | (SEQ ID | |
| | NO: 726) | NO: 214) | |
| hN1S3-006 | GYNFTGYY | INPNSGG | ATDSFDY (SEQ ID NO: 209) |
| | (SEQ ID | (SEQ ID | |
| | NO: 207) | NO: 208) | |
| hN1S3-007 | GYNFTGYY | INPNSGG | ATDSFDY (SEQ ID NO: 209) |
| | (SEQ ID | (SEQ ID | |
| | NO: 207) | NO: 208) | |
| hN1S3-023 | GYNFTGYY | INPNSGG | ATDSFDY (SEQ ID NO: 209) |
| | (SEQ ID | (SEQ ID | |
| | NO: 207) | NO: 208) | |
| hN1S3-030 | GYNFTGYY | INPNSGG | ATDSFDY (SEQ ID NO: 209) |
| | (SEQ ID | (SEQ ID | |
| | NO: 207) | NO: 208) | |
| hN1S3-032 | GYNFTGYY | INPNSGG | ATDSFDY (SEQ ID NO: 209) |
| | (SEQ ID | (SEQ ID | |
| | NO: 207) | NO: 208) | |
| hN1S3-035 | GYNFTGYY | INPNSGG | ATDSFDY (SEQ ID NO: 209) |
| | (SEQ ID | (SEQ ID | |
| | NO: 207) | NO: 208) | |
| hN1S3-036 | GYNFTGYY | INPNSGG | ATDSFDY (SEQ ID NO: 209) |
| | (SEQ ID | (SEQ ID | |
| | NO: 207) | NO: 208) | |
| hN1S3-038 | GYNFTGYY | INPNSGG | ATDSFDY (SEQ ID NO: 209) |
| | (SEQ ID | (SEQ ID | |
| | NO: 207) | NO: 208) | |
| hN1S3-040 | GFTFTSSA | IVVGSGN | VADTVY (SEQ ID NO: 215) |
| | (SEQ ID | (SEQ ID | |
| | NO: 213) | NO: 214) | |
| hN1S3-053 | GYNFTGYY | INPNSGG | ATDSFDY (SEQ ID NO: 209) |
| | (SEQ ID | (SEQ ID | |
| | NO: 207) | NO: 208) | |
| hN1S3-055 | GYNFTGYY | INPNSGG | ATDSFDY (SEQ ID NO: 209) |
| | (SEQ ID | (SEQ ID | |
| | NO: 207) | NO: 208) | |
| hN1S3-147 | GFTFTSSA | IVVGSGN | VADTVY (SEQ ID NO: 215) |
| | (SEQ ID | (SEQ ID | |
| | NO: 213) | NO: 214) | |
| hN1S3-074 | GYNFTGYY | INPNSGG | ATDSFDY (SEQ ID NO: 209) |
| | (SEQ ID | (SEQ ID | |
| | NO: 207) | NO: 208) | |
| hN1S3-077 | GYGFSNYY | INPSDGS (SEQ | AREKANSMYFDY (SEQ ID NO: 729) |
| | (SEQ ID | ID NO: 728) | |
| | NO: 727) | | |
| hN1S3-082 | GFTFTSSA | IVVGSGN | VADTVY (SEQ ID NO: 215) |
| | (SEQ ID | (SEQ ID | |
| | NO: 213) | NO: 214) | |
| hN1S3-083 | GDSISSSSAT | TYYRSKWY | ARQLGGRIEF (SEQ ID NO: 732) |
| | (SEQ ID | (SEQ ID | |
| | NO: 730) | NO: 731) | |
| hN1S3-087 | GFTFTSYF | INPSRGN | ARDRLGGLLDYYDSSDSSKNFDAFDF |
| | (SEQ ID | (SEQ ID | (SEQ ID NO: 212) |
| | NO: 210) | NO: 211) | |
| hN1S3-088 | GFTFSSYA | ISGSGGS | ATEPPFDI (SEQ ID NO: 735) |
| | (SEQ ID | (SEQ ID | |
| | NO: 733) | NO: 734) | |
| hN1S3-091 | GYNFTGYY | INPNSGG | ATDSFDY (SEQ ID NO: 209) |
| | (SEQ ID | (SEQ ID | |
| | NO: 207) | NO: 208) | |
| hN1S3-092 | GYNFTGYY | INPNSGG | ATDSFDY (SEQ ID NO: 209) |
| | (SEQ ID | (SEQ ID | |
| | NO: 207) | NO: 208) | |
| hN1S3-095 | GYNFTGYY | INPNSGG | ATDSFDY (SEQ ID NO: 209) |
| | (SEQ ID | (SEQ ID | |
| | NO: 207) | NO: 208) | |
| hN1S3-096 | GYNFTGYY | INPNSGG | ATDSFDY (SEQ ID NO: 209) |
| | (SEQ ID | (SEQ ID | |
| | NO: 207) | NO: 208) | |
| hN1S3-107 | GYTFTDYF | INPNTGG | ARGAYDYVWGSHRYVADAFDI (SEQ |
| | (SEQ ID | (SEQ ID | ID NO: 738) |
| | NO: 736) | NO: 737) | |
| hN1S3-112 | GYNFTGYY | INPNSGG | ATDSFDY (SEQ ID NO: 209) |
| | (SEQ ID | (SEQ ID | |
| | NO: 207) | NO: 208) | |
| hN1S3-124 | GYNFTGYY | INPNSGG | ATDSFDY (SEQ ID NO: 209) |
| | (SEQ ID | (SEQ ID | |
| | NO: 207) | NO: 208) | |
| hN1S3-127 | GYNFTGYY | INPNSGG | ATDSFDY (SEQ ID NO: 209) |
| | (SEQ ID | (SEQ ID | |
| | NO: 207) | NO: 208) | |
| hN1S3-133 | GFTFTSSA | IVVGSGN | VADTVY (SEQ ID NO: 215) |
| | (SEQ ID | (SEQ ID | |
| | NO: 213) | NO: 214) | |
| hN1S3-135 | GYNFTGYY | INPNSGG | ATDSFDY (SEQ ID NO: 209) |
| | (SEQ ID | (SEQ ID | |
| | NO: 207) | NO: 208) | |
| hN1S3-136 | GYNFTGYY | INPNSGG | ATDSFDY (SEQ ID NO: 209) |
| | (SEQ ID | (SEQ ID | |
| | NO: 207) | NO: 208) | |
| hN1S3-141 | GYNFTGYY | INPNSGG | ATDSFDY (SEQ ID NO: 209) |
| | (SEQ ID | (SEQ ID | |
| | NO: 207) | NO: 208) | |
| hN1S3-151 | GYNFTGYY | INPNSGG | ATDSFDY (SEQ ID NO: 209) |
| | (SEQ ID | (SEQ ID | |
| | NO: 207) | NO: 208) | |
| hN1S3-153 | GFTFGNYV | ITEGGGDF | AKSGGDDNSNYNFEY (SEQ ID |
| | (SEQ ID | (SEQ ID | NO: 741) |
| | NO: 739) | NO: 740) | |
| hN1S3-177 | GYNFTGYY | INPNSGG | ATDSFDY (SEQ ID NO: 209) |
| | (SEQ ID | (SEQ ID | |
| | NO: 207) | NO: 208) | |
| hN1S3-181 | GYNFTGYY | INPNSGG | ATDSFDY (SEQ ID NO: 209) |
| | (SEQ ID | (SEQ ID | |
| | NO: 207) | NO: 208) | |
| hN1S3-182 | GYNFTGYY | INPNSGG | ATDSFDY (SEQ ID NO: 209) |
| | (SEQ ID | (SEQ ID | |
| | NO: 207) | NO: 208) | |
| hN1S3-184 | GYNFTGYY | INPNSGG | ATDSFDY (SEQ ID NO: 209) |
| | (SEQ ID | (SEQ ID | |
| | NO: 207) | NO: 208) | |
| hN1S3-190 | GFTFTSYF | INPSRGN | ARDRLGGLLDYYDSSDSSKNFDAFDF |
| | (SEQ ID | (SEQ ID | (SEQ ID NO: 212) |
| | NO: 210) | NO: 211) | |
| hN1S3-191 | GYNFTGYY | INPNSGG | ATDSFDY (SEQ ID NO: 208) |
| | (SEQ ID | (SEQ ID | |
| | NO: 207) | NO: 208) | |
| hN1S3-108 | GYTFTDYY | INPNTGG | ARGAYDYVWGSHRYVADAFDI (SEQ |
| | (SEQ ID | (SEQ ID | ID NO: 738) |
| | NO: 268) | NO: 737) | |
| hN1S3-130 | GYTFTDFY | INSKSGD (SEQ | ARGAYDYVWGSSRYVADAFDI (SEQ |
| | (SEQ ID | ID NO: 743) | ID NO: 744) |
| | NO: 742) | | |
| N1wc614 | GYNFTGYY | INPNSGG | ATDSFDY (SEQ ID NO: 209) |
| | (SEQ ID | (SEQ ID | |
| | NO: 207) | NO: 208) | |
| N1wc621 | GYTFTGYY | ISPNSGV (SEQ | AREGREDGVLFDY (SEQ ID NO: 747) |
| | (SEQ ID | ID NO: 746) | |
| | NO: 745) | | |
| N1wc624 | GYNFTGYY | INPNSGG | ATDSFDY (SEQ ID NO: 209) |
| | (SEQ ID | (SEQ ID | |
| | NO: 207) | NO: 208) | |
| N1wc633 | GYNFTGYY | INPNSGG | ATDSFDY (SEQ ID NO: 209) |
| | (SEQ ID | (SEQ ID | |
| | NO: 207) | NO: 208) | |
| N1wc441 | GYSFTDYY | INPNNGG | ATDGPPGTGNAFDI (SEQ ID NO: 749) |
| | (SEQ ID | (SEQ ID | |
| | NO: 748) | NO: 724) | |
| N1wc476 | GYNFTGYY | INPNSGG | ATDSFDY (SEQ ID NO: 209) |
| | (SEQ ID | (SEQ ID | |
| | NO: 207) | NO: 208) | |
| N1wc516 | GYNFTGYY | INPNSGG | ATDSFDY (SEQ ID NO: 209) |
| | (SEQ ID | (SEQ ID | |
| | NO: 207) | NO: 208) | |
| N1wc535 | GYNFTGYY | INPNSGG | ATDSFDY (SEQ ID NO: 209) |
| | (SEQ ID | (SEQ ID | |
| | NO: 207) | NO: 208) | |
| N1wc540 | GYNFTGYY | INPNSGG | ATDSFDY (SEQ ID NO: 209) |
| | (SEQ ID | (SEQ ID | |
| | NO: 207) | NO: 208) | |
| N1wc558 | GYNFTGYY | INPNSGG | ATDSFDY (SEQ ID NO: 209) |
| | (SEQ ID | (SEQ ID | |
| | NO: 207) | NO: 208) | |
| N1wc570 | GFTFTSSA | IVVGSGN | VADTVY (SEQ ID NO: 215) |
| | (SEQ ID | (SEQ ID | |
| | NO: 213) | NO: 214) | |
| N1wc572 | GYNFTGYY | INPNSGG | ATDSFDY (SEQ ID NO: 209) |
| | (SEQ ID | (SEQ ID | |
| | NO: 207) | NO: 208) | |
| N1wc586 | GYTFPDFY | INSNSGS (SEQ | ARGAYDYVWGTSRYVADAFDI (SEQ |
| | (SEQ ID | ID NO: 751) | ID NO: 752) |
| | NO: 750) | | |
| N1wc102 | GYNFTGYY | INPNSGG | ATDSFDY (SEQ ID NO: 209) |
| | (SEQ ID | (SEQ ID | |
| | NO: 207) | NO: 208) | |
| N1wc113 | GYSFSRYY | INPGGGT | ARSNYDILAGYGPDAFDF (SEQ ID |
| | (SEQ ID | (SEQ ID | NO: 272) |
| | NO: 270) | NO: 271) | |
| N1wc117 | GYNFTGYY | INPNSGG | ATDSFDY (SEQ ID NO: 209) |
| | (SEQ ID | (SEQ ID | |
| | NO: 207) | NO: 208) | |
| N1wc125 | GFTFTGYY | VDPYNGA | ARGWELDS (SEQ ID NO: 755) |
| | (SEQ ID | (SEQ ID | |
| | NO: 753) | NO: 754) | |
| N1wc127 | GYNFTGYY | INPNSGG | ATDSFDY (SEQ ID NO: 209) |
| | (SEQ ID | (SEQ ID | |
| | NO: 207) | NO: 208) | |
| N1wc129 | GYNFTGYY | IDPNSGG | ASDSFDH (SEQ ID NO: 756) |
| | (SEQ ID | (SEQ ID | |
| | NO: 207) | NO: 208) | |
| N1wc130 | GYNFTGYY | INPNSGG | ATDSFDY (SEQ ID NO: 209) |
| | (SEQ ID | (SEQ ID | |
| | NO: 207) | NO: 208) | |
| N1wc131 | GYNFTGYY | INPNSGG | ATDSFDY (SEQ ID NO: 209) |
| | (SEQ ID | (SEQ ID | |
| | NO: 207) | NO: 208) | |
| N1wc132 | GYNFTGYY | INPNSGG | VSDSFDH (SEQ ID NO: 757) |
| | (SEQ ID | (SEQ ID | |
| | NO: 207) | NO: 208) | |
| N1wc135 | GYNFTGYY | INPNSGG | ATDSFDY (SEQ ID NO: 209) |
| | (SEQ ID | (SEQ ID | |
| | NO: 207) | NO: 208) | |
| N1wc150 | GYNFTGYY | INPNSGG | ATDSFDY (SEQ ID NO: 209) |
| | (SEQ ID | (SEQ ID | |
| | NO: 207) | NO: 208) | |
| N1wc164 | GYTFTKYY | INPTNGY (SEQ | TRSYSNYDSFDI (SEQ ID NO: 760) |
| | (SEQ ID | ID NO: 759) | |
| | NO: 758) | | |
| N1wc170 | GYTFSSFG | VSPYSGD | ANSPISDGSSSSYDN (SEQ ID NO: 763) |
| | (SEQ ID | (SEQ ID | |
| | NO: 761) | NO: 762) | |
| N1wc11 | GFTFTNSA | IVVGSGN | VADTVY (SEQ ID NO: 215) |
| | (SEQ ID | (SEQ ID | |
| | NO: 726) | NO: 214) | |
| N1wc13 | GYNFTGYY | INPNSGG | ATDSFDY (SEQ ID NO: 209) |
| | (SEQ ID | (SEQ ID | |
| | NO: 207) | NO: 208) | |
| N1wc15 | GYNFTGYY | INPNSGG | ATDSFDY (SEQ ID NO: 209) |
| | (SEQ ID | (SEQ ID | |
| | NO: 207) | NO: 208) | |
| N1wc16 | GYTFTDNY | INVNSGA (SEQ | ARDFRYSGVDV (SEQ ID NO: 766) |
| | (SEQ ID | ID NO: 765) | |
| | NO: 764) | | |
| N1wc177 | GGTFSNYA | IIPGFGK (SEQ | ARDRGPDIGVAHFDS (SEQ ID NO: 768) |
| | (SEQ ID | ID NO: 767) | |
| | NO: 279) | | |
| N1wc182 | GFTFTSSA | IVVGSGN | VADTVY (SEQ ID NO: 215) |
| | (SEQ ID | (SEQ ID | |
| | NO: 213) | NO: 214) | |
| N1wc21 | GYTFTDHY | MNPKSGG | ASDPTIPPSPNYDYYYYAMDL (SEQ ID |
| | (SEQ ID | (SEQ ID | NO: 771) |
| | NO: 769) | NO: 770) | |
| N1wc24 | GGSMTSNF | VLYTGS (SEQ | ARGNGWYLP (SEQ ID NO: 774) |
| | (SEQ ID | ID NO: 773) | |
| | NO: 772) | | |
| N1wc39 | GHTFTNYA | INADNGN | ARDPWSGVLDH (SEQ ID NO: 777) |
| | (SEQ ID | (SEQ ID | |
| | NO: 775) | NO: 776) | |
| N1wc45 | GYSFRSYG | ISAYNGN (SEQ | VRGDRHYDILTGYSPVWFDP (SEQ ID |
| | (SEQ ID | ID NO: 292) | NO: 779) |
| | NO: 778) | | |
| N1wc72 | GYNFTGYY | INPNSGG | ATDSFDY (SEQ ID NO: 209) |
| | (SEQ ID | (SEQ ID | |
| | NO: 207) | NO: 208) | |
| N1wc79 | GYNFTGYY | INPNSGG | ATDSFDY (SEQ ID NO: 209) |
| | (SEQ ID | (SEQ ID | |
| | NO: 207) | NO: 208) | |
| N1wc82 | GYNFTGYY | INPNSGG | ATDSFDY (SEQ ID NO: 209) |
| | (SEQ ID | (SEQ ID | |
| | NO: 207) | NO: 208) | |
| N1wc197 | GYNFTGYY | INPNSGG | ATDSFDY (SEQ ID NO: 209) |
| | (SEQ ID | (SEQ ID | |
| | NO: 207) | NO: 208) | |
| N1wc241 | GYTFNDYY | INPHTGV (SEQ | ARERSEWRNTVSSPSEYFHH (SEQ ID |
| | (SEQ ID | ID NO: 781) | NO: 782) |
| | NO: 780) | | |
| N1wc266 | GYNFTGYY | INPNSGG | ATDSFDY (SEQ ID NO: 209) |
| | (SEQ ID | (SEQ ID | |
| | NO: 207) | NO: 208) | |
| N1wc281 | GYTFTTNS | INPRDGS | ARDGLDYRDTSRILAPTDV (SEQ ID |
| | (SEQ ID | (SEQ ID | NO: 785) |
| | NO: 783) | NO: 784) | |
| N1wc289 | GYKFTDYY | VDPTDDE | IRGIAALAD (SEQ ID NO: 788) |
| | (SEQ ID | (SEQ ID | |
| | NO: 786) | NO: 787) | |
| N1wc301 | GYIFGTYA | INAGTGN | TRGDYYDSRGYYNRFDY (SEQ ID |
| | (SEQ ID | (SEQ ID | NO: 791) |
| | NO: 789) | NO: 790) | |
| N1wc336 | GYNFTGYY | INPNSGG | ATDSFDY (SEQ ID NO: 209) |
| | (SEQ ID | (SEQ ID | |
| | NO: 207) | NO: 208) | |
| N1wc403 | GYNFTGYY | INPNSGG | ATDSFDY (SEQ ID NO: 209) |
| | (SEQ ID | (SEQ ID | |
| | NO: 207) | NO: 208) | |
| N1wc338 | GYNFTGYY | INPNSGG | ATDSFDY (SEQ ID NO: 209) |
| | (SEQ ID | (SEQ ID | |
| | NO: 207) | NO: 208) | |
| N1wc225 | GYNFTGYY | INPNSGG | ATDSFDY (SEQ ID NO: 209) |
| | (SEQ ID | (SEQ ID | |
| | NO: 207) | NO: 208) | |
| N1wc295 | GYNFTGYY | INPNSGG | ATDSFDY (SEQ ID NO: 209) |
| | (SEQ ID | (SEQ ID | |
| | NO: 207) | NO: 208) | |
| N1wc239 | GYNFTGYY | INPNSGG | ATDSFDY (SEQ ID NO: 209) |
| | (SEQ ID | (SEQ ID | |
| | NO: 207) | NO: 208) | |
| N1wc248 | GYNFTGYY | INPNSGG | ATDSFDY (SEQ ID NO: 209) |
| | (SEQ ID | (SEQ ID | |
| | NO: 207) | NO: 208) | |
| N1wc319 | GYNFTGYY | INPNSGG | ATDSFDY (SEQ ID NO: 209) |
| | (SEQ ID | (SEQ ID | |
| | NO: 207) | NO: 208) | |

Light Chain

| Clone Name | LC-CDR1 | LC-CDR2 | LC-CDR3 |
|---|---|---|---|
| hN1S3-001 | SSNIGSNT (SEQ | SN | AAWDDSLNGYV (SEQ |
| | ID NO: 226) | | ID NO: 215) |
| hN1S3-002 | SSNIGSNT (SEQ | NN | ASWDDSLNGRV (SEQ |
| | ID NO: 226) | | ID NO: 303) |
| hN1S3-003 | SSNIGSNT (SEQ | SN | AAWDDSLNGWV (SEQ |
| | ID NO: 226) | | ID NO: 792) |
| hN1S3-006 | NSNIGSNT (SEQ | SN | AAWDDSLNGYV (SEQ |
| | ID NO: 246) | | ID NO: 215) |
| hN1S3-007 | RSNIGSNA (SEQ | NT | SSWDDSLNGLE (SEQ ID |
| | ID NO: 793) | | NO: 794) |
| hN1S3-023 | SSNIGSNT (SEQ | SN | AAWDDSLNGYV (SEQ |
| | ID NO: 226) | | ID NO: 315) |
| hN1S3-030 | SSNIGSNY (SEQ | RN | GSWDDSLSGVV (SEQ |
| | ID NO: 228) | | ID NO: 795) |
| hN1S3-032 | SSNIGAGYD | GN | QSYDSSLSGSV (SEQ ID |
| | (SEQ ID NO: 241) | | NO: 248) |
| hN1S3-035 | SSNIGAGYD | GN | QSYDSSLSGSV (SEQ ID |
| | (SEQ ID NO: 241) | | NO: 248) |
| hN1S3-036 | SSNIGSNY (SEQ | RN | AAWDDSLSGVV (SEQ |
| | ID NO: 228) | | ID NO: 225) |
| hN1S3-038 | SSNIGSNY (SEQ | RN | AAWDDSLSGVV (SEQ |
| | ID NO: 228) | | ID NO: 225) |
| hN1S3-040 | SSNIGRNS (SEQ | GD | AAWDDSLNGWV (SEQ |
| | ID NO: 796) | | ID NO: 792) |
| hN1S3-053 | RSNIGAGYD | GN | QSYDSSLSGSV (SEQ ID |
| | (SEQ ID NO: 797) | | NO: 248) |
| hN1S3-055 | SSNIGSNT (SEQ | TN | AAWDDSLNGVV (SEQ |
| | ID NO: 226) | | ID NO: 223) |
| hN1S3-147 | SSNIGSNP (SEQ | SD | ATWDDSLSGWV (SEQ |
| | ID NO: 310) | | ID NO: 798) |
| hN1S3-074 | SSNIGSNT (SEQ | IS | AAWDDSLNGAV (SEQ |
| | ID NO: 226) | | ID NO: 234) |
| hN1S3-077 | HSNIGNFY (SEQ | DN | STWDRSLSASV (SEQ ID |
| | ID NO: 799) | | NO: 800) |
| hN1S3-082 | GSNIGSNT (SEQ | NN | AAWDDSLNGWL (SEQ |
| | ID NO: 801) | | ID NO: 802) |
| hN1S3-083 | SRDVGAYNY | EV | SSYAGSDSWV (SEQ ID |
| | (SEQ ID NO: 803) | | NO: 804) |
| hN1S3-087 | SGSIGSSY (SEQ | ED | QSYDANNRV (SEQ ID |
| | ID NO: 805) | | NO: 806) |
| hN1S3-088 | SSNIGNDV (SEQ | ND | AVWDDSLDGWV (SEQ |
| | ID NO: 807) | | ID NO: 808) |
| hN1S3-091 | NSNIGSNY (SEQ | SN | AAWDDSLNGHI (SEQ ID |
| | ID NO: 224) | | NO: 809) |
| hN1S3-092 | SSNIGANY (SEQ | KN | AAWDDSLSGLV (SEQ ID |
| | ID NO: 810) | | NO: 329) |
| hN1S3-095 | NSNIGSNT (SEQ | GN | ATWDDSLNGFV (SEQ ID |
| | ID NO: 246) | | NO: 811) |
| hN1S3-096 | SSNIASNS (SEQ | RN | AAWDDNLYGVV (SEQ |
| | ID NO: 812) | | ID NO: 813) |
| hN1S3-107 | SSNIGSNT (SEQ | NN | ASWDDSLNGRV (SEQ |
| | ID NO: 226) | | ID NO: 303) |
| hN1S3-112 | SSNIGNNY (SEQ | RN | GGWDDSLSGQVV (SEQ |
| | ID NO: 814) | | ID NO: 815) |
| hN1S3-124 | SSNIGSNT (SEQ | AT | AAWDDSLNGKV (SEQ |
| | ID NO: 226) | | ID NO: 816) |
| hN1S3-127 | TSNIGGNP (SEQ | RD | ASWDDSLGGVV (SEQ |
| | ID NO: 817) | | ID NO: 818) |
| hN1S3-133 | SSNIGNNA (SEQ | YD | ATWDDSLNAWV (SEQ |
| | ID NO: 222) | | ID NO: 819) |
| hN1S3-135 | SFNIGNNA (SEQ | YD | AAWDDSLNAVV (SEQ ID |
| | ID NO: 820) | | NO: 333) |
| hN1S3-136 | TSNIGDNT (SEQ | SN | AAWDDSRNGYV (SEQ |
| | ID NO: 821) | | ID NO: 822) |
| hN1S3-141 | YSNIGSNY (SEQ | TN | AAWDDSVGVLL (SEQ ID |
| | ID NO: 244) | | NO: 336) |
| hN1S3-151 | SSNIGSNT (SEQ | SN | AAWDDSLNGGV (SEQ |
| | ID NO: 226) | | ID NO: 823) |
| hN1S3-153 | SSNTGAGYY | GN | QSYDRSLSGWV (SEQ |
| | (SEQ ID NO: 824) | | ID NO: 825) |
| hN1S3-177 | SSNIGTNY (SEQ | SN | AAWDDSLSGLV (SEQ ID |
| | ID NO: 826) | | NO: 329) |
| hN1S3-181 | SPNIGSNT (SEQ | TN | AAWDDSLLGVV (SEQ ID |
| | ID NO: 235) | | NO: 236) |
| hN1S3-182 | SSNIGSPYD | GN | QTYDSTLNGAV (SEQ ID |
| | (SEQ ID NO: 827) | | NO: 828) |
| hN1S3-184 | SSNIGGNY (SEQ | RS | AAWDDSLHGVI (SEQ ID |
| | ID NO: 829) | | NO: 830) |
| hN1S3-190 | SLRSNY (SEQ ID | SE | HSRGSSGNHKV (SEQ |
| | NO: 831) | | ID NO: 832) |
| hN1S3-191 | SSNIGSNT (SEQ | TN | AAWDDSLNGYV (SEQ |
| | ID NO: 235) | | ID NO: 215) |
| hN1S3-108 | QGISSW (SEQ ID | KA | QQSYSTPWT (SEQ ID |
| | NO: 833) | | NO: 834) |
| hN1S3-130 | QGISSW (SEQ ID | KA | QQSYSTPWT (SEQ ID |
| | NO: 833) | | NO: 834) |
| N1wc614 | SSNIGSNT (SEQ | SN | AAWDDSLNGLV (SEQ ID |
| | ID NO: 235) | | NO: 233) |
| N1wc621 | SSNLGAGYD | NN | QTYDTRLSGSML (SEQ |
| | (SEQ ID NO: 835) | | ID NO: 836) |
| N1wc624 | SSNIGSNT (SEQ | SN | AAWDDSLNGKV (SEQ |
| | ID NO: 235) | | ID NO: 816) |
| N1wc633 | SSNIGSYT (SEQ | SN | AAWDDSLSDVL (SEQ ID |
| | ID NO: 837) | | NO: 838) |
| N1wc441 | ALPDKY (SEQ ID | DD | YSTDSSGNERV (SEQ ID |
| | NO: 326) | | NO: 327) |
| N1wc476 | NSNIGNNY (SEQ | RN | ASWDDSLSGLV (SEQ ID |
| | ID NO: 839) | | NO: 840) |
| N1wc516 | SSNIGSNT (SEQ | SN | AAWDDSLNDVV (SEQ |
| | ID NO: 235) | | ID NO: 841) |
| N1wc535 | SSNIGSNT (SEQ | SD | AGWDDSLNAYL (SEQ ID |
| | ID NO: 235) | | NO: 842) |
| N1wc540 | SSNIGSYT (SEQ | SN | AAWDDSLSDVL (SEQ ID |
| | ID NO: 837) | | NO: 838) |
| N1wc558 | SSNIGSNS (SEQ | SN | AAWDDSLNNLV (SEQ ID |
| | ID NO: 328) | | NO: 843) |
| N1wc570 | TSNIGNNN (SEQ | SN | ATWDDSLSAWV (SEQ |
| | ID NO: 844) | | ID NO: 845) |
| N1wc572 | SSNIGSNP (SEQ | SD | AAWDDSLNAVV (SEQ ID |
| | ID NO: 310) | | NO: 333) |
| N1wc586 | QGISSW (SEQ ID | KA | QQSYSTPWT (SEQ ID |
| | NO: 833) | | NO: 834) |
| N1wc102 | SSNIGSNP (SEQ | GD | AAWDDSLNGVV (SEQ |
| | ID NO: 310) | | ID NO: 223) |
| N1wc113 | SSNIGAGND | GN | QSYDSSLGGSDV (SEQ |
| | (SEQ ID NO: 846) | | ID NO: 847) |
| N1wc117 | SSNIGGNT (SEQ | GT | AAWDDFLNGKV (SEQ |
| | ID NO: 848) | | ID NO: 849) |
| N1wc125 | SSDVGGYNY | EG | SSYTTRSTRV (SEQ ID |
| | (SEQ ID NO: 266) | | NO: 267) |
| N1wc127 | SSNIGSNG (SEQ | SN | AAWDDSLNDYV (SEQ |
| | ID NO: 850) | | ID NO: 851) |
| N1wc129 | GSNIGRNA (SEQ | SN | ATWDDSLNDYV (SEQ ID |
| | ID NO: 852) | | NO: 853) |
| N1wc130 | GSNIGAGYD | AN | QSYDSSLSGSV (SEQ ID |
| | (SEQ ID NO: 854) | | NO: 248) |
| N1wc131 | SSNIGINY (SEQ | YN | AAWDDSLSGLV (SEQ ID |
| | ID NO: 855) | | NO: 329) |
| N1wc132 | SSNIGSNP (SEQ | SD | AAWDDSQNAVV (SEQ |
| | ID NO: 310) | | ID NO: 856) |
| N1wc135 | SSNIGSNY (SEQ | RN | AAWDDSLSGVV (SEQ |
| | ID NO: 228) | | ID NO: 225) |
| N1wc150 | GSNIGKNT (SEQ | SN | AAWDDSLNDMV (SEQ |
| | ID NO: 857) | | ID NO: 858) |
| N1wc164 | SSNIGAGYD | RN | QSYDTRLSDSVI (SEQ |
| | (SEQ ID NO: 241) | | ID NO: 859) |
| N1wc170 | NIGTKS (SEQ ID | ED | YSADNTGDQRM (SEQ |
| | NO: 860) | | ID NO: 861) |
| N1wc11 | SSNLGINT (SEQ | SD | AAWDDSLNGWV (SEQ |
| | ID NO: 862) | | ID NO: 792) |
| N1wc13 | SSNIGSNY (SEQ | RN | AAWDDSLSGLV (SEQ ID |
| | ID NO: 228) | | NO: 329) |
| N1wc15 | SSSIGSNT (SEQ | SN | AAWDDSLNGLV (SEQ ID |
| | ID NO: 863) | | NO: 233) |
| N1wc16 | AIERKS (SEQ ID | DD | QVWDTSSGHDAVV |
| | NO: 864) | | (SEQ ID NO: 865) |
| N1wc177 | SSNIGKYI (SEQ | TY | ASWDDSLNVVV (SEQ ID |
| | ID NO: 866) | | NO: 867) |
| N1wc182 | SSNIGSNT (SEQ | SN | AAWDDSLNGNWV (SEQ |
| | ID NO: 235) | | ID NO: 868) |
| N1wc21 | ALPDKY (SEQ ID | DD | YSTDSSGNERV (SEQ ID |
| | NO: 326) | | NO: 327) |
| N1wc24 | SSNIENNI (SEQ | YD | AAWDDSLKAVV (SEQ ID |
| | ID NO: 869) | | NO: 870) |
| N1wc39 | QNINKW (SEQ ID | TA | QQAFSFPIT (SEQ ID |
| | NO: 871) | | NO: 872) |
| N1wc45 | SLRSYY (SEQ ID | GK | NSRDSSGNHVV (SEQ |
| | NO: 873) | | ID NO: 874) |
| N1wc72 | YSNIGSNY (SEQ | TN | AAWDDSVGVLL (SEQ ID |
| | ID NO: 244) | | NO: 336) |
| N1wc79 | TSNIGKNT (SEQ | SD | AAWDDSLDGLV (SEQ ID |
| | ID NO: 875) | | NO: 876) |
| N1wc82 | NSNIGNNY (SEQ | DS | ATWDAGLSVLI (SEQ ID |
| | ID NO: 839) | | NO: 877) |
| N1wc197 | SSNIGSNY (SEQ | TN | AAWDDSLSGVV (SEQ |
| | ID NO: 228) | | ID NO: 225) |
| N1wc241 | FSNIGSNN (SEQ | RN | AVRDDSLSGHYV (SEQ |
| | ID NO: 878) | | ID NO: 879) |
| N1wc266 | RSNIGSNA (SEQ | NT | SSWDDSLNGLE (SEQ ID |
| | ID NO: 793) | | NO: 794) |
| N1wc281 | KLGDKY (SEQ ID | QD | QAWDSNTDHVI (SEQ ID |
| | NO: 880) | | NO: 881) |
| N1wc289 | SDINLETSR (SEQ | YQSDSD | MIWHSGGSV (SEQ ID |
| | ID NO: 882) | (SEQ ID | NO: 884) |
| | | NO: 883) | |
| N1wc301 | SSNIGKNN (SEQ | RN | AARDDSLNGYV (SEQ ID |
| | ID NO: 885) | | NO: 886) |
| N1wc336 | YSNIGSNY (SEQ | TN | AAWDDSVSVLL (SEQ ID |
| | ID NO: 244) | | NO: 245) |
| N1wc403 | SSNIGSNT (SEQ | TN | AAWDDSLNGYV (SEQ |
| | ID NO: 226) | | ID NO: 215) |
| N1wc338 | SSNIGTYT (SEQ | SN | AAWDDSLHGYV (SEQ |
| | ID NO: 887) | | ID NO: 888) |
| N1wc225 | SSNIGAGYD | GN | QSYDSSLSGSV (SEQ ID |
| | (SEQ ID NO: 241) | | NO: 248) |
| N1wc295 | RSNIGSNT (SEQ | SN | AAWDDNLNGYV (SEQ |
| | ID NO: 889) | | ID NO: 890) |
| N1wc239 | HSNIRSND (SEQ | SN | ATWDDSLSGVV (SEQ ID |
| | ID NO: 891) | | NO: 892) |
| N1wc248 | SSNIGSNS (SEQ | RN | ATWDDSLSGVV (SEQ ID |
| | ID NO: 329) | | NO: 892) |
| N1wc319 | SSNIGSNS (SEQ | SD | ATWDDSLTGLV (SEQ ID |
| | ID NO: 328) | | NO: 893) |

APPENDIX V
Constant Region DNA Sequences

>Lambda Light Chain Constant Region
CAGCCCAAGGCCAACCCCACCGTGACCCTGTTCCCCCCATCTTCTGAGGAGCTGCAAGCCAACAAGGCCACCCTGGT
GTGCCTGATCTCTGACTTCTACCCTGGCGCTGTGACAGTGGCCTGGAAGGCTGATGGCTCTCCTGTGAAGGCTGGCG
TGGAGACCACCAAGCCATCTAAGCAGTCTAACAACAAGTATGCTGCCTCTTCTTACCTGTCTCTGACCCCTGAGCAG
TGGAAGAGCCACCGGTCTTACTCTTGCCAGGTGACCCATGAGGGCTCTACAGTGGAGAAGACAGTGGCCCCCACAGA
GTGCTCTTGA (SEQ ID NO: 894)
>Kappa Light Chain Constant Region
CGTACGGTGGCTGCACCATCTGTCTTCATCTTCCCGCCATCTGATGAGCAGTTGAAATCTGGAACTGCCTCTGTTGT
GTGCCTGCTGAATAACTTCTATCCCAGAGAGGCCAAAGTACAGTGGAAGGTGGATAACGCCCTCCAATCGGGTAACT
CCCAGGAGAGTGTCACAGAGCAGGACAGCAAGGACAGCACCTACAGCCTCAGCAGCACCCTGACGCTGAGCAAAGCA
GACTACGAGAAACACAAAGTCTACGCCTGCGAAGTCACCCATCAGGGCCTGAGCTCGCCCGTCACAAAGAGCTTCAA
CAGGGGAGAGTGTTAG (SEQ ID NO: 895)
>IgG1 Heavy Chain Constant Region
GCATCCACCAAGGGCCCATCTGTCTTCCCCCTGGCCCCATCCTCCAAGAGCACCTCTGGCGGCACAGCTGCCCTGGG
CTGCCTGGTGAAGGACTACTTCCCTGAGCCTGTGACAGTGTCCTGGAACTCTGGCGCCCTGACCAGCGGCGTGCACA
CCTTCCCTGCTGTGCTCCAGTCCTCTGGCCTGTACTCCCTGAGCAGCGTGGTGACAGTGCCATCCAGCAGCCTGGGC
ACCCAGACCTACATCTGCAATGTGAACCACAAGCCCAGCAACACCAAGGTGGACAAGCGGGTGGAGCCCAAGTCCTG
TGACAAGACCCACACCTGCCCCCCATGCCCCGCCCCTGAGCTGCTGGGCGGCCCATCTGTCTTCCTGTTCCCCCCCA
AGCCCAAGGACACCCTGATGATCTCCCGGACCCCCGAGGTGACCTGTGTGGTGGTGGATGTGAGCCATGAGGACCCC
GAGGTGAAGTTCAACTGGTATGTGGATGGCGTGGAGGTGCACAACGCCAAGACCAAGCCCCGGGAGGAGCAGTACAA
CAGCACCTACCGGGTGGTGAGCGTGCTGACAGTGCTGCATCAGGACTGGCTGAATGGCAAGGAGTACAAGTGCAAGG
TGTCCAACAAGGCCCTGCCTGCCCCCATTGAGAAGACCATCTCCAAGGCCAAGGGCCAGCCCCGGGAGCCCCAGGTC
TACACCCTGCCCCCCTCCCGGGAGGAGATGACCAAGAACCAGGTGAGCCTGACCTGCCTGGTGAAGGGCTTCTACCC
CAGCGACATTGCTGTGGAGTGGGAGAGCAACGGCCAGCCTGAGAACAACTACAAGACCACCCCCCCTGTGCTGGACT
CTGATGGCTCCTTCTTCCTGTACAGCAAGCTGACAGTGGACAAGAGCCGGTGGCAGCAGGGCAATGTCTTCTCCTGC
TCTGTGATGCATGAGGCCCTGCACAACCACTACACCCAGAAGAGCCTGTCCCTGTCCCCCGGCAAGTGA
(SEQ ID NO: 896)

APPENDIX VI
Constant Region Protein Sequences

>Lambda Light Chain Constant Region
QPKANPTVTLFPPSSEELQANKATLVCLISDFYPGAVTVAWKADGSPVKAGVETTKPSKQSNNKYAASSYLSLTPEQ
WKSHRSYSCQVTHEGSTVEKTVAPTECS (SEQ ID NO: 897)
>Kappa Light Chain Constant Region
RTVAAPSVFIFPPSDEQLKSGTASVVCLLNNFYPREAKVQWKVDNALQSGNSQESVTEQDSKDSTYSLSSTLTLSKA
DYEKHKVYACEVTHQGLSSPVTKSFNRGEC (SEQ ID NO: 898)
>IgG1 Heavy Chain Constant Region
ASTKGPSVFPLAPSSKSTSGGTAALGCLVKDYFPEPVTVSWNSGALTSGVHTFPAVLQSSGLYSLSSVVTVPSSSLG
TQTYICNVNHKPSNTKVDKRVEPKSCDKTHTCPPCPAPELLGGPSVFLFPPKPKDTLMISRTPEVTCVVVDVSHEDP
EVKFNWYVDGVEVHNAKTKPREEQYNSTYRVVSVLTVLHQDWLNGKEYKCKVSNKALPAPIEKTISKAKGQPREPQV
YTLPPSREEMTKNQVSLTCLVKGFYPSDIAVEWESNGQPENNYKTTPPVLDSDGSFFLYSKLTVDKSRWQQGNVFSC
SVMHEALHNHYTQKSLSLSPGK (SEQ ID NO: 899)

APPENDIX VII
Leader DNA sequences

>Light Chain Leader Sequence
ATGAGTGTGCCCACTCAGGTCCTGGGGTTGCTGCTGCTGTGGCTTACA
GATGCCAGATGC (SEQ ID NO: 900)
>Heavy Chain Leader Sequence
ATGGAATGGAGCTGGGTCTTTCTCTTCTTCCTGTCAGTAACTACAGGTGT
CCACTCG (SEQ ID NO: 901)

APPENDIX VIII
Leader Protein Sequences

>Light Chain Leader Sequence
MSVPTQVLGLLLLWLTDARC (SEQ ID NO: 902)
>Heavy Chain Leader Sequence
MEWSWVFLFFLSVTTGVHS (SEQ ID NO: 903)

APPENDIX IX
Group I - Notch1 specific antibodies
A. Aminoacid sequence
A.1-Binding to NRR

[chemical structure]

Heavy chain
EVQLVQSGAEVKKPGSSVKVSCKASGGTFSSFAFSWVRQAPGQGLDWMGRIIPILGRTN
YAQKFQGRVTFTADTSTSTVYMELSSLSSEDTAVYYCARDREYSLSLGGSDYWGQGTL
VTVSSASTKGPSVFPLAPSSKSTSGGTAALGCLVKDYFPEPVTVSWNSGALTSGVHTFPA
VLQSSGLYSLSSVVTVPSSSLGTQTYICNVNHKPSNTKVDKRVEPKSCDKTHTCPPCPAP
ELLGGPSVFLFPPKPKDTLMISRTPEVTCVVVDVSHEDPEVKFNWYVDGVEVHNAKTKP
REEQYNSTYRVVSVLTVLHQDWLNGKEYKCKVSNKALPAPIEKTISKAKGQPREPQVY
TLPPSREEMTKNQVSLTCLVKGFYPSDIAVEWESNGQPENNYKTTPPVLDSDGSFFLYSK
LTVDKSRWQQGNVFSCSVMHEALHNHYTQKSLSLSPGK (SEQ ID NO: 904)
Light chain
QAVLTQPSSVSGAPGQRVTISCIGSSSNIGAGYDVHWYRQPPGTAPQLLIYANTNRPSGV
PDRFSGSRSGTSASLAITGIQAEDEADYYCQSYDSSLSGRVFGGGTKVTVLGQPKAAPSV
TLFPPSSEELQANKATLVCLISDFYPGAVTVAWKADSSPVKAGVETTTPSKQSNNKYAA
SSYLSLTPEQWKSHRSYSCQVTHEGSTVEKTVAPTECS (SEQ ID NO: 905)

[chemical structure]

Heavy chain
EVQLQLVETGGGLVQPVGSLRLSCAASGFSFDNYAMSWVRQAPGKGLEWVSSISGSGG
QIFYADSVKGRFTISRDNAKNTLVLQMNSLRVDDTAVYYCARDFYRTPGYNTNWGYW
GRGTMVTVSSASTKGPSVFPLAPSSKSTSGGTAALGCLVKDYFPEPVTVSWNSGALTSG
VHTFPAVLQSSGLYSLSSVVTVPSSSLGTQTYICNVNHKPSNTKVDKRVEPKSCDKTHTC
PPCPAPELLGGPSVFLFPPKPKDTLMISRTPEVTCVVVDVSHEDPEVKFNWYVDGVEVH
NAKTKPREEQYNSTYRVVSVLTVLHQDWLNGKEYKCKVSNKALPAPIEKTISKAKGQP
REPQVYTLPPSREEMTKNQVSLTCLVKGFYPSDIAVEWESNGQPENNYKTTPPVLDSDG
SFFLYSKLTVDKSRWQQGNVFSCSVMHEALHNHYTQKSLSLSPGK (SEQ ID NO: 906)
Light chain
SYVLTQPPSVSVSPGETASISCSGDGLGNKYVAWYQQKPGQSPVLVIQQDSKRPSGIPER
FSGSNSGDTATLTISGTQSLDEGDYYCQAWDRPAVIFGGGTKLTVLGQPKAAPSVTLFPP
SSEELQANKATLVCLISDFYPGAVTVAWKADSSPVKAGVETTTPSKQSNNKYAASSYLS
LTPEQWKSHRSYSCQVTHEGSTVEKTVAPTECS (SEQ ID NO: 907)
A.2-Additional Notch Antibodies

[chemical structure]

Heavy chain
EVQLLESGGGLVQPGGSLRLSCAASGFTFSSYAMSWVRQAPGKGLEWVSAISGSGGSTY
YADSVKGRFTISRDNSKNTLYLQMNSLRAEDTAVYYCARHGHSSGYFVYWGKGTMVT
VSSASTKGPSVFPLAPSSKSTSGGTAALGCLVKDYFPEPVTVSWNSGALTSGVHTFPAVL
QSSGLYSLSSVVTVPSSSLGTQTYICNVNHKPSNTKVDKRVEPKSCDKTHTCPPCPAPEL
LGGPSVFLFPPKPKDTLMISRTPEVTCVVVDVSHEDPEVKFNWYVDGVEVHNAKTKPRE
EQYNSTYRVVSVLTVLHQDWLNGKEYKCKVSNKALPAPIEKTISKAKGQPREPQVYTLP
PSREEMTKNQVSLTCLVKGFYPSDIAVEWESNGQPENNYKTTPPVLDSDGSFFLYSKLT
VDKSRWQQGNVFSCSVMHEALHNHYTQKSLSLSPGK (SEQ ID NO: 908)
Light chain
QAVLTQPSSVSGAPGQRVTISCTGTSSNIGAPYDVNWYQQLPGIAPKLLISGNTNRPSGV
PDRFSGSKSGASASLAITGLQADDEADYYCQSYDHSLSGWVFGGGTKVTVLGQPKAAP
SVTLFPPSSEELQANKATLVCLISDFYPGAVTVAWKADSSPVKAGVETTTPSKQSNNKY
AASSYLSLTPEQWKSHRSYSCQVTHEGSTVEKTVAPTECS (SEQ ID NO: 909)

[chemical structure]

Heavy chain
EVQLWESGGGLVQPGGSLRLSCAASGFTFSSYAMSWVRQAPGKGLEWVSAISGSGGST
YYADSVKGRFTISRDNSKNTLYLQMNSLRAEDTAVYYCARSQLPYCGGDCYGSDYWG
RGTMVTVSSASTKGPSVFPLAPSSKSTSGGTAALGCLVKDYFPEPVTVSWNSGALTSGV
HTFPAVLQSSGLYSLSSVVTVPSSSLGTQTYICNVNHKPSNTKVDKRVEPKSCDKTHTCP
PCPAPELLGGPSVFLFPPKPKDTLMISRTPEVTCVVVDVSHEDPEVKFNWYVDGVEVHN
AKTKPREEQYNSTYRVVSVLTVLHQDWLNGKEYKCKVSNKALPAPIEKTISKAKGQPR
EPQVYTLPPSREEMTKNQVSLTCLVKGFYPSDIAVEWESNGQPENNYKTTPPVLDSDGS
FFLYSKLTVDKSRWQQGNVFSCSVMHEALHNHYTQKSLSLSPGK (SEQ ID NO: 910)
Light chain
QAVLTQPSSVSVSPGQTASITCSGDKLGDKYASWYQQRPGQSPLLVIYKDSERPSGIPERFSGSSAGNT
ATLTISGTQPMDEADYYCQAWDSGAVFGGGTKVTVLGQPKAAPSVTLFPPSSEELQANKATLVCLISDFY
PGAVTVAWKADSSPVKAGVETTTPSKQSNNKYAASSYLSLTPEQWKSHRSYSCQVTHEGSTVEKTVAP
TECS (SEQ ID NO: 911)

[chemical structure]

Heavy chain
QVQLVQSGAEVKKPGESLRISCKASGYTFTDYYLHWVRQAPGKGLEWMGWLNPNSGG
TNYAQKFQGRVTMTRDTSISTAYMELSRLRSDDTAVYFCARGAYDYVWGTSRYVADA
FDIWGQGTMVTVSSASTKGPSVFPLAPSSKSTSGGTAALGCLVKDYFPEPVTVSWNSGA
LTSGVHTFPAVLQSSGLYSLSSVVTVPSSSLGTQTYICNVNHKPSNTKVDKRVEPKSCDK
THTCPPCPAPELLGGPSVFLFPPKPKDTLMISRTPEVTCVVVDVSHEDPEVKFNWYVDG
VEVHNAKTKPREEQYNSTYRVVSVLTVLHQDWLNGKEYKCKVSNKALPAPIEKTISKA
KGQPREPQVYTLPPSREEMTKNQVSLTCLVKGFYPSDIAVEWESNGQPENNYKTTPPVL
DSDGSFFLYSKLTVDKSRWQQGNVFSCSVMHEALHNHYTQKSLSLSPGK (SEQ ID NO: 912)
Light chain
QSVLTQPPSASGTPGQRVTISCSGSSSNIGSNTVNWYQRLPGAAPQLLIYNNDQRPSGIPD
RFSGSKSGTSGSLVISGLQSEDEADYYCASWDDSLNGRVFGGGTKLTVLGQPKAAPSVT
LFPPSSEELQANKATLVCLISDFYPGAVTVAWKADSSPVKAGVETTTPSKQSNNKYAAS
SYLSLTPEQWKSHRSYSCQVTHEGSTVEKTVAPTECS (SEQ ID NO: 913)

[chemical structure]

Heavy chain
EVQLVQSGAEVKKPGSSVKVSCKASGGTLSSSAISWVRQAPGEGLEWMGGIIPMFDSTN
YAQKFQGRVTITADESTSTAFMELSSLRSDDTAVYYCGRDPYYDRLSGGGYMDVWGQ
GTLVTVSSASTKGPSVFPLAPSSKSTSGGTAALGCLVKDYFPEPVTVSWNSGALTSGVHT
FPAVLQSSGLYSLSSVVTVPSSSLGTQTYICNVNHKPSNTKVDKRVEPKSCDKTHTCPPC
PAPELLGGPSVFLFPPKPKDTLMISRTPEVTCVVVDVSHEDPEVKFNWYVDGVEVHNAK
TKPREEQYNSTYRVVSVLTVLHQDWLNGKEYKCKVSNKALPAPIEKTISKAKGQPREPQ
VYTLPPSREEMTKNQVSLTCLVKGFYPSDIAVEWESNGQPENNYKTTPPVLDSDGSFFL
YSKLTVDKSRWQQGNVFSCSVMHEALHNHYTQKSLSLSPGK (SEQ ID NO: 914)
Light chain
SYVLTQPPSVSGALRQTATVTCTGNSSNVGNQGAAWLRQHQGRPPKLLSYRNNDRPSG
VSQRFSASTSGNTASLTITGLQSEDEADYFCSAWDSSRSGWVFGGGTKLTVLGQPKAAP
SVTLFPPSSEELQANKATLVCLISDFYPGAVTVAWKADSSPVKAGVETTTPSKQSNNKY
AASSYLSLTPEQWKSHRSYSCQVTHEGSTVEKTVAPTECS (SEQ ID NO: 915)

[chemical structure]

Heavy chain
EVQLVQSGAEVKEPGESLRISCKASGYDFSNYWIAWVRQMPGKGLEWMGIIYPGDSDT
RYSPSFQGQVTISVDRSISTAYLQWSSLKASDTALYYCSRPTYWSTTWGREFDYWGQGT
LVTVSSASTKGPSVFPLAPSSKSTSGGTAALGCLVKDYFPEPVTVSWNSGALTSGVHTFP
AVLQSSGLYSLSSVVTVPSSSLGTQTYICNVNHKPSNTKVDKRVEPKSCDKTHTCPPCPA
PELLGGPSVFLFPPKPKDTLMISRTPEVTCVVVDVSHEDPEVKFNWYVDGVEVHNAKTK
PREEQYNSTYRVVSVLTVLHQDWLNGKEYKCKVSNKALPAPIEKTISKAKGQPREPQV
YTLPPSREEMTKNQVSLTCLVKGFYPSDIAVEWESNGQPENNYKTTPPVLDSDGSFFLYS
KLTVDKSRWQQGNVFSCSVMHEALHNHYTQKSLSLSPGK (SEQ ID NO: 916)
Light chain
SYELTQPPSVSVSPGQTATITCSGDALPKKYAYWYQQKSGQAPVLVVYEDSKRPSGIPE
RFSGSSSGTMATLTISGAQVEDEADYYCYSTDSSGNHWVFGGGTKLTVLGQPKAAPSV
TLFPPSSEELQANKATLVCLISDFYPGAVTVAWKADSSPVKAGVETTTPSKQSNNKYAA
SSYLSLTPEQWKSHRSYSCQVTHEGSTVEKTVAPTECS (SEQ ID NO: 917)

[chemical structure]

Heavy chain
QVQLVQSGTEVKKPGASVRVSCKPSADTFTSYYVHWVRQAPGQGLEWMGTINPTGTY
TRYAQQFQGRVTVTRDTSTSSVYMELSSLRSEDSAVYYCARDVRPYTAMYSFDNWGR
GTTVTVSSASTKGPSVFPLAPSSKSTSGGTAALGCLVKDYFPEPVTVSWNSGALTSGVHT
FPAVLQSSGLYSLSSVVTVPSSSLGTQTYICNVNHKPSNTKVDKRVEPKSCDKTHTCPPC
PAPELLGGPSVFLFPPKPKDTLMISRTPEVTCVVVDVSHEDPEVKFNWYVDGVEVHNAK
TKPREEQYNSTYRVVSVLTVLHQDWLNGKEYKCKVSNKALPAPIEKTISKAKGQPREPQ
VYTLPPSREEMTKNQVSLTCLVKGFYPSDIAVEWESNGQPENNYKTTPPVLDSDGSFFL
YSKLTVDKSRWQQGNVFSCSVMHEALHNHYTQKSLSLSPGK (SEQ ID NO: 918)
Light chain
SYVLTQPPSVSVSPGQTATITCSGDALPKQYANWYQQKPGQAPVLMIYKDSDRPSGIPE
RFSGSSSGTKATLTISGVQAEDEADYYCQSADNSGTNYVFGTGTKLTVLGQPKAAPSVT
LFPPSSEELQANKATLVCLISDFYPGAVTVAWKADSSPVKAGVETTTPSKQSNNKYAAS
SYLSLTPEQWKSHRSYSCQVTHEGSTVEKTVAPTECS (SEQ ID NO: 919)
B. DNA sequence
B.1-Binding to NRR
A2780-C2-16|B-000000397-000M
Heavy chain
GTGCAGCTGGTGCAGTCTGGGGCTGAGGTGAAGAAGCCTGGGTCCTCGGTGAAGGT
CTCCTGCAAGGCTTCTGGAGGCACCTTCAGCAGCTTTGCTTTCAGCTGGGTGCGACA
GGCCCCTGGACAAGGGCTTGACTGGATGGGAAGGATCATCCCTATACTTGGTAGAA
CAAACTACGCACAGAAATTCCAGGGCAGAGTCACCTTTACCGCGGACACATCCACG
AGCACAGTCTACATGGAATTGAGCAGTCTGAGCTCTGAGGACACGGCCGTGTATTA
CTGTGCGAGAGACCGGGAATATAGCTTGAGTCTGGGGGGCAGTGACTACTGGGGCC
AGGGCACCCTGGTCACCGTCTCGAGTGCCTCCACCAAGGGCCCATCGGTCTTCCCCC
TGGCACCCTCCTCCAAGAGCACCTCTGGGGGCACAGCGGCCCTGGGCTGCCTGGTCA
AGGACTACTTCCCCGAACCGGTGACGGTGTCGTGGAACTCAGGCGCCCTGACAGCG
GCGTGCACACCTTCCCGGCTGTCCTACAGTCCTCAGGACTCTACTCCCTCAGCAGCG
TGGTGACAGTGCCCTCCAGCAGCTTGGGCACCCAGACCTACATCTGCAACGTGAATC
ACAAGCCCAGCAACACCAAGGTGGACAAGAGAGTTGAGCCCAAATCTTGTGACAAA
ACTCACACATGCCCACCGTGCCCAGCACCTGAACTCCTGGGGGGACCGTCAGTCTTC
CTCTTCCCCCCAAAACCCAAGGACACCCTCATGATCTCCCGGACCCCTGAGGTCACA
TGCGTGGTGGTGGACGTGAGCCACGAAGACCCTGAGGTCAAGTTCAACTGGTACGT
GGACGGCGTGGAGGTGCATAATGCCAAGACAAAGCCGCGGGAGGAGCAGTACAAC
AGCACGTACCGTGTGGTCAGCGTCCTCACCGTCCTGCACCAGGACTGGCTGAATGGC
AAGGAGTACAAGTGCAAGGTCTCCAACAAAGCCCTCCCAGCCCCCATCGAGAAAAC
CATCTCCAAAGCCAAAGGGCAGCCCCGAGAACCACAGGTGTACACCCTGCCCCCAT
CCCGGGAGGAGATGACCAAGAACCAGGTCAGCCTGACCTGCCTGGTCAAAGGCTTC
TATCCCAGCGACATCGCCGTGGAGTGGGAGAGCAATGGGCAGCCGGAGAACAACTA
CAAGACCACGCCTCCCGTGCTGGACTCCGACGGCTCCTTCTTCCTCTATAGCAAGCT
CACCGTGGACAAGAGCAGGTGGCAGCAGGGGAACGTCTTCTCATGCTCCGTGATGC
ATGAGGCTCTGCACAACCACTACACGCAGAAGAGCCTCTCCCTGTCTCCGGGTAAAT
GA (SEQ ID NO: 920)
Light chain (lambda)
CAGGCTGTGCTGACTCAGCCGTCCTCAGTGTCTGGGGCCCCAGGGCAGAGGGTCAC
CATCTCCTGCATTGGGAGCAGCTCCAACATCGGGGCGGGTTATGATGTACACTGGTA
TCGCCAGCCTCCAGGAACAGCCCCCCAACTCCTCATCTATGCAAACACCAATCGGCC
CTCTGGGGTCCCTGACCGATTCTCTGGCTCCCGGTCTGGCACCTCAGCCTCCCTGGCC
ATCACTGGGATCCAGGCTGAGGATGAGGCTGATTATTACTGCCAGTCCTACGACAGC
AGCCTGAGTGGCAGGGTGTTCGGCGGAGGGACCAAGGTCACCGTCCTAGGTGGTCA
GCCCAAGGCTGCCCCCTCGGTCACTCTGTTCCCGCCCTCCTCTGAGGAGCTTCAAGC
CAACAAGGCCACACTGGTGTGTCTCATAAGTGACTTCTACCCGGGAGCCGTGACAGT
GGCCTGGAAGGCAGATAGCAGCCCCGTCAAGGCGGGAGTGGAGACCACCACACCCT
CCAAACAAAGCAACAACAAGTACGCGGCCAGCAGCTATCTGAGCCTGACGCCTGAG
CAGTGGAAGTCCCACAGAAGCTACAGCTGCCAGGTCACGCATGAAGGGAGCACCGT
GGAGAAGACAGTGGCCCCTACAGAATGTTCATAG (SEQ ID NO: 921)
FL-JEG3-C2-11|B-000000399-000E
Heavy chain
GAGGTGCAGCTGCAGCTGGTGGAGACTGGGGGAGGCTTGGTGCAGCCTGTGGGGTC
CCTGAGACTCTCCTGTGCAGCCTCTGGATTCTCCTTTGACAACTATGCCATGAGCTG
GGTCCGCCAGGCTCCAGGGAAGGGACTGGAGTGGGTCTCAAGTATTAGTGGGAGTG
GTGGGCAAATATTCTACGCAGACTCCGTGAAGGGCCGGTTCACCATCTCCAGAGAC
AACGCCAAGAACACGCTGGTTTTGCAAATGAACAGCCTGAGAGTCGACGACACGGC
CGTCTATTACTGTGCGAGAGATTTCTACCGGACCCCCGGTTATAATACCAACTGGGG
ATACTGGGGCAGGGGGACAATGGTCACCGTCTCGAGTGCCTCCACCAAGGGCCCAT
CGGTCTTCCCCCTGGCACCCTCCTCCAAGAGCACCTCTGGGGGCACAGCGGCCCTGG
GCTGCCTGGTCAAGGACTACTTCCCCGAACCGGTGACGGTGTCGTGGAACTCAGGC
GCCCTGACAGCGGCGTGCACACCTTCCCGGCTGTCCTACAGTCCTCAGGACTCTACT
CCCTCAGCAGCGTGGTGACAGTGCCCTCCAGCAGCTTGGGCACCCAGACCTACATCT
GCAACGTGAATCACAAGCCCAGCAACACCAAGGTGGACAAGAGAGTTGAGCCCAA
ATCTTGTGACAAAACTCACACATGCCCACCGTGCCCAGCACCTGAACTCCTGGGGGG
ACCGTCAGTCTTCCTCTTCCCCCCAAAACCCAAGGACACCCTCATGATCTCCCGGAC
CCCTGAGGTCACATGCGTGGTGGTGGACGTGAGCCACGAAGACCCTGAGGTCAAGT
TCAACTGGTACGTGGACGGCGTGGAGGTGCATAATGCCAAGACAAAGCCGCGGGAG
GAGCAGTACAACAGCACGTACCGTGTGGTCAGCGTCCTCACCGTCCTGCACCAGGA
CTGGCTGAATGGCAAGGAGTACAAGTGCAAGGTCTCCAACAAAGCCCTCCCAGCCC
CCATCGAGAAAACCATCTCCAAAGCCAAAGGGCAGCCCCGAGAACCACAGGTGTAC
ACCCTGCCCCCATCCCGGGAGGAGATGACCAAGAACCAGGTCAGCCTGACCTGCCT
GGTCAAAGGCTTCTATCCCAGCGACATCGCCGTGGAGTGGGAGAGCAATGGGCAGC
CGGAGAACAACTACAAGACCACGCCTCCCGTGCTGGACTCCGACGGCTCCTTCTTCC
TCTATAGCAAGCTCACCGTGGACAAGAGCAGGTGGCAGCAGGGGAACGTCTTCTCA
TGCTCCGTGATGCATGAGGCTCTGCACAACCACTACACGCAGAAGAGCCTCTCCCTG
TCTCCGGGTAAATGA (SEQ ID NO: 922)
Light chain
TCCTATGTGCTGACTCAGCCACCCTCAGTGTCCGTGTCCCCAGGAGAGACAGCCAGC
ATCTCCTGCTCTGGTGATGGATTGGGGAATAAATATGTTGCTTGGTATCAGCAGAAG
CCAGGCCAGTCCCCTGTCCTGGTCATCCAGCAAGATTCCAAGCGGCCCTCAGGAATC
CCTGAGCGATTCTCTGGCTCCAATTCTGGGGACACAGCCACTCTGACCATCAGCGGG
ACGCAGTCTCTGGATGAGGGTGACTATTATTGTCAGGCGTGGGACAGACCCGCTGTG
ATATTCGGCGGGGGGACCAAGCTGACCGTCCTAGGTGGTCAGCCCAAGGCTGCCCC
CTCGGTCACTCTGTTCCCGCCCTCCTCTGAGGAGCTTCAAGCCAACAAGGCCACACT
GGTGTGTCTCATAAGTGACTTCTACCCGGGAGCCGTGACAGTGGCCTGGAAGGCAG
ATAGCAGCCCCGTCAAGGCGGGAGTGGAGACCACCACACCCTCCAAACAAAGCAAC
AACAAGTACGCGGCCAGCAGCTATCTGAGCCTGACGCCTGAGCAGTGGAAGTCCCA
CAGAAGCTACAGCTGCCAGGTCACGCATGAAGGGAGCACCGTGGAGAAGACAGTG
GCCCCTACAGAATGTTCATAG (SEQ ID NO: 923)
B.2-Additional Notch Antibodies
FL-SKNAS-D2-268|B-000000395-000V
Heavy chain
GAGGTGCAGCTGTTGGAGTCTGGGGGAGGCTTGGTACAGCCTGGGGGGTCCCTGAG
ACTCTCCTGTGCAGCCTCTGGATTCACCTTTAGCAGCTATGCCATGAGCTGGGTCCG
CCAGGCTCCAGGGAAGGGGCTGGAGTGGGTCTCAGCTATTAGTGGTAGTGGTGGTA
GCACATACTACGCAGACTCCGTGAAGGGCCGGTTCACCATCTCCAGAGACAATTCC
AAGAACACGCTGTATCTGCAAATGAACAGCCTGAGAGCCGAGGACACGGCCGTGTA
TTACTGTGCGAGACATGGCCATAGCAGTGGCTACTTTGTCTATTGGGGCAAGGGGAC
AATGGTCACCGTCTCGAGTGCCTCCACCAAGGGCCCATCGGTCTTCCCCCTGGCACC
CTCCTCCAAGAGCACCTCTGGGGGCACAGCGGCCCTGGGCTGCCTGGTCAAGGACT
ACTTCCCCGAACCGGTGACGGTGTCGTGGAACTCAGGCGCCCTGACAGCGGCGTGC
ACACCTTCCCGGCTGTCCTACAGTCCTCAGGACTCTACTCCCTCAGCAGCGTGGTGA
CAGTGCCCTCCAGCAGCTTGGGCACCCAGACCTACATCTGCAACGTGAATCACAAG
CCCAGCAACACCAAGGTGGACAAGAGAGTTGAGCCCAAATCTTGTGACAAAACTCA
CACATGCCCACCGTGCCCAGCACCTGAACTCCTGGGGGGACCGTCAGTCTTCCTCTT
CCCCCCAAAACCCAAGGACACCCTCATGATCTCCCGGACCCCTGAGGTCACATGCGT
GGTGGTGGACGTGAGCCACGAAGACCCTGAGGTCAAGTTCAACTGGTACGTGGACG
GCGTGGAGGTGCATAATGCCAAGACAAAGCCGCGGGAGGAGCAGTACAACAGCAC
GTACCGTGTGGTCAGCGTCCTCACCGTCCTGCACCAGGACTGGCTGAATGGCAAGG
AGTACAAGTGCAAGGTCTCCAACAAAGCCCTCCCAGCCCCCATCGAGAAAACCATC
TCCAAAGCCAAAGGGCAGCCCCGAGAACCACAGGTGTACACCCTGCCCCCATCCCG
GGAGGAGATGACCAAGAACCAGGTCAGCCTGACCTGCCTGGTCAAAGGCTTCTATC
CCAGCGACATCGCCGTGGAGTGGGAGAGCAATGGGCAGCCGGAGAACAACTACAA
GACCACGCCTCCCGTGCTGGACTCCGACGGCTCCTTCTTCCTCTATAGCAAGCTCAC
CGTGGACAAGAGCAGGTGGCAGCAGGGGAACGTCTTCTCATGCTCCGTGATGCATG
AGGCTCTGCACAACCACTACACGCAGAAGAGCCTCTCCCTGTCTCCGGGTAAATGA
(SEQ ID NO: 924)
Light chain
CAGGCTGTGCTGACTCAGCCGTCCTCAGTGTCTGGGGCCCCAGGGCAGAGGGTCAC
CATCTCCTGCACTGGGACCTCCTCCAACATCGGGGCACCTTATGATGTAAACTGGTA
CCAACAGCTGCCAGGAATAGCCCCCAAACTCCTCATCTCTGGTAACACCAATCGGCC
CTCAGGAGTCCCTGACCGATTCTCTGGCTCCAAGTCTGGCGCCTCAGCCTCCCTGGC
CATCACTGGGCTCCAGGCTGACGATGAGGCTGATTATTACTGTCAGTCCTATGACCA
CAGCCTGAGTGGTTGGGTGTTCGGCGGCGGGACCAAGGTCACCGTCCTAGGTGGTC
AGCCCAAGGCTGCCCCCTCGGTCACTCTGTTCCCGCCCTCCTCTGAGGAGCTTCAAG
CCAACAAGGCCACACTGGTGTGTCTCATAAGTGACTTCTACCCGGGAGCCGTGACA
GTGGCCTGGAAGGCAGATAGCAGCCCCGTCAAGGCGGGAGTGGAGACCACCACACC
CTCCAAACAAAGCAACAACAAGTACGCGGCCAGCAGCTATCTGAGCCTGACGCCTG
AGCAGTGGAAGTCCCACAGAAGCTACAGCTGCCAGGTCACGCATGAAGGGAGCACC
GTGGAGAAGACAGTGGCCCCTACAGAATGTTCATAG (SEQ ID NO: 925)
FL-SKNAS-D2-281|B-000000398-000W
Heavy chain
GAGGTGCAGCTGTGGGAGTCTGGGGGAGGCTTGGTACAGCCTGGGGGGTCCCTGAG
ACTCTCCTGTGCAGCCTCTGGATTCACCTTTAGCAGCTATGCCATGAGCTGGGTCCG
CCAGGCTCCAGGGAAGGGGCTGGAGTGGGTCTCAGCTATTAGTGGTAGTGGTGGTA
GCACATACTACGCAGACTCCGTGAAGGGCCGGTTCACCATCTCCAGAGACAATTCC
AAGAACACGCTGTATCTGCAAATGAACAGCCTGAGAGCCGAGGACACGGCCGTGTA
TTACTGTGCGAGAAGTCAGCTCCCATACTGTGGTGGTGACTGCTATGGTAGCGACTA
CTGGGGCCGGGGGACAATGGTCACCGTCTCGAGTGCCTCCACCAAGGGCCCATCGG
TCTTCCCCCTGGCACCCTCCTCCAAGAGCACCTCTGGGGGCACAGCGGCCCTGGGCT
GCCTGGTCAAGGACTACTTCCCCGAACCGGTGACGGTGTCGTGGAACTCAGGCGCC
CTGACAGCGGCGTGCACACCTTCCCGGCTGTCCTACAGTCCTCAGGACTCTACTCCC
TCAGCAGCGTGGTGACAGTGCCCTCCAGCAGCTTGGGCACCCAGACCTACATCTGCA
ACGTGAATCACAAGCCCAGCAACACCAAGGTGGACAAGAGAGTTGAGCCCAAATCT
TGTGACAAAACTCACACATGCCCACCGTGCCCAGCACCTGAACTCCTGGGGGGACC
GTCAGTCTTCCTCTTCCCCCCAAAACCCAAGGACACCCTCATGATCTCCCGGACCCC
TGAGGTCACATGCGTGGTGGTGGACGTGAGCCACGAAGACCCTGAGGTCAAGTTCA
ACTGGTACGTGGACGGCGTGGAGGTGCATAATGCCAAGACAAAGCCGCGGGAGGA
GCAGTACAACAGCACGTACCGTGTGGTCAGCGTCCTCACCGTCCTGCACCAGGACTG
GCTGAATGGCAAGGAGTACAAGTGCAAGGTCTCCAACAAAGCCCTCCCAGCCCCCA
TCGAGAAAACCATCTCCAAAGCCAAAGGGCAGCCCCGAGAACCACAGGTGTACACC
CTGCCCCCATCCCGGGAGGAGATGACCAAGAACCAGGTCAGCCTGACCTGCCTGGT
CAAAGGCTTCTATCCCAGCGACATCGCCGTGGAGTGGGAGAGCAATGGGCAGCCGG
AGAACAACTACAAGACCACGCCTCCCGTGCTGGACTCCGACGGCTCCTTCTTCCTCT
ATAGCAAGCTCACCGTGGACAAGAGCAGGTGGCAGCAGGGGAACGTCTTCTCATGC
TCCGTGATGCATGAGGCTCTGCACAACCACTACACGCAGAAGAGCCTCTCCCTGTCT
CCGGGTAAATGA (SEQ ID NO: 926)
Light chain
CAGGCTGTGCTGACTCAGCCGTCCTCAGTGTCCGTGTCCCCAGGACAGACAGCCAGC
ATCACCTGCTCTGGAGATAAATTGGGAGATAAATATGCTTCCTGGTATCAACAGAGG
CCAGGCCAGTCCCCTCTACTGGTCATTTATAAAGATTCCGAGCGGCCCTCAGGGATC
CCTGAACGATTCTCTGGCTCCAGCGCTGGGAATACAGCCACTCTGACCATCAGCGGG
ACCCAGCCTATGGATGAGGCTGACTATTACTGTCAGGCGTGGGACAGCGGTGCTGT
ATTCGGCGGAGGGACCAAGGTCACCGTCCTAGGTGGTCAGCCCAAGGCTGCCCCCT
CGGTCACTCTGTTCCCGCCCTCCTCTGAGGAGCTTCAAGCCAACAAGGCCACACTGG
TGTGTCTCATAAGTGACTTCTACCCGGGAGCCGTGACAGTGGCCTGGAAGGCAGAT
AGCAGCCCCGTCAAGGCGGGAGTGGAGACCACCACACCCTCCAAACAAAGCAACA
ACAAGTACGCGGCCAGCAGCTATCTGAGCCTGACGCCTGAGCAGTGGAAGTCCCAC
AGAAGCTACAGCTGCCAGGTCACGCATGAAGGGAGCACCGTGGAGAAGACAGTGG
CCCCTACAGAATGTTCATAG (SEQ ID NO: 927)
FL-G402-B2-133|B-000000400-000E
Heavy chain
CAGGTGCAGCTGGTGCAGTCTGGGGCAGAGGTGAAAAAGCCCGGGGAGTCTCTGAG
GATCTCCTGTAAGGCTTCTGGATACACCTTCACCGACTACTATCTGCACTGGGTGCG
ACAGGCCCCTGGAAAAGGGCTTGAGTGGATGGGATGGCTCAACCCTAACAGTGGTG
GCACAAACTATGCACAGAAGTTTCAGGGCAGGGTCACCATGACCAGGGACACGTCC
ATCAGCACAGCCTATATGGAGCTGAGCAGGCTGAGATCTGACGACACGGCCGTGTA
TTTTTGTGCGAGAGGGGCCTATGATTACGTCTGGGGGACTTCTCGCTATGTCGCTGA
TGCTTTCGATATCTGGGGCCAAGGGACAATGGTCACCGTCTCTTCAGCCTCCACCAA
GGGCCCATCGGTCTTCCCCCTGGCACCCTCCTCCAAGAGCACCTCTGGGGGCACAGC
GGCCCTGGGCTGCCTGGTCAAGGACTACTTCCCCGAACCGGTGACGGTGTCGTGGA
ACTCAGGCGCCCTGACAGCGGCGTGCACACCTTCCCGGCTGTCCTACAGTCCTCAGG
ACTCTACTCCCTCAGCAGCGTGGTGACAGTGCCCTCCAGCAGCTTGGGCACCCAGAC
CTACATCTGCAACGTGAATCACAAGCCCAGCAACACCAAGGTGGACAAGAGAGTTG
AGCCCAAATCTTGTGACAAAACTCACACATGCCCACCGTGCCCAGCACCTGAACTCC
TGGGGGGACCGTCAGTCTTCCTCTTCCCCCCAAAACCCAAGGACACCCTCATGATCT
CCCGGACCCCTGAGGTCACATGCGTGGTGGTGGACGTGAGCCACGAAGACCCTGAG
GTCAAGTTCAACTGGTACGTGGACGGCGTGGAGGTGCATAATGCCAAGACAAAGCC
GCGGGAGGAGCAGTACAACAGCACGTACCGTGTGGTCAGCGTCCTCACCGTCCTGC
ACCAGGACTGGCTGAATGGCAAGGAGTACAAGTGCAAGGTCTCCAACAAAGCCCTC
CCAGCCCCCATCGAGAAAACCATCTCCAAAGCCAAAGGGCAGCCCCGAGAACCACA
GGTGTACACCCTGCCCCCATCCCGGGAGGAGATGACCAAGAACCAGGTCAGCCTGA
CCTGCCTGGTCAAAGGCTTCTATCCCAGCGACATCGCCGTGGAGTGGGAGAGCAAT
GGGCAGCCGGAGAACAACTACAAGACCACGCCTCCCGTGCTGGACTCCGACGGCTC
CTTCTTCCTCTATAGCAAGCTCACCGTGGACAAGAGCAGGTGGCAGCAGGGGAACG
TCTTCTCATGCTCCGTGATGCATGAGGCTCTGCACAACCACTACACGCAGAAGAGCC
TCTCCCTGTCTCCGGGTAAATGA (SEQ ID NO: 928)
Light chain
CAGTCTGTGCTGACTCAGCCACCCTCAGCGTCTGGGACCCCCGGGCAGAGGGTCACC
ATCTCTTGTTCTGGAAGCAGCTCCAACATCGGGAGTAACACTGTAAACTGGTACCAG
CGACTCCCAGGAGCGGCCCCCCAACTCCTCATCTACAATAATGACCAGCGGCCCTCA
GGGATCCCTGACCGATTCTCTGGCTCCAAGTCTGGCACCTCAGGCTCCCTGGTCATC
AGTGGGCTCCAGTCTGAAGATGAGGCTGATTACTACTGTGCGTCATGGGATGACAGT
CTGAATGGTCGGGTGTTCGGCGGAGGGACCAAGCTGACCGTCCTAGGTGGTCAGCC
CAAGGCTGCCCCCTCGGTCACTCTGTTCCCGCCCTCCTCTGAGGAGCTTCAAGCCAA
CAAGGCCACACTGGTGTGTCTCATAAGTGACTTCTACCCGGGAGCCGTGACAGTGGC
CTGGAAGGCAGATAGCAGCCCCGTCAAGGCGGGAGTGGAGACCACCACACCCTCCA
AACAAAGCAACAACAAGTACGCGGCCAGCAGCTATCTGAGCCTGACGCCTGAGCAG
TGGAAGTCCCACAGAAGCTACAGCTGCCAGGTCACGCATGAAGGGAGCACCGTGGA
GAAGACAGTGGCCCCTACAGAATGTTCATAG (SEQ ID NO: 929)
FL-SKNAS-C2-384|B-000000401-000N
Heavy chain
GAAGTGCAGCTGGTGCAGTCTGGGGCTGAGGTGAAGAAGCCTGGGTCCTCGGTGAA
GGTCTCCTGCAAGGCTTCTGGAGGCACCCTCAGCAGTTCTGCTATCAGCTGGGTGCG
ACAGGCCCCTGGAGAAGGGCTTGAGTGGATGGGAGGGATCATCCCTATGTTTGATT
CAACAAACTACGCACAGAAGTTCCAGGGCAGAGTCACCATTACCGCGGACGAATCG
ACGAGCACAGCCTTCATGGAGCTGAGCAGCCTGAGATCTGACGACACGGCCGTGTA
TTATTGTGGGAGAGACCCCTACTATGATCGCCTTTCTGGGGGGGGGTACATGGACGT
CTGGGGCCAAGGAACCCTGGTCACCGTCTCGAGTGCCTCCACCAAGGGCCCATCGG
TCTTCCCCCTGGCACCCTCCTCCAAGAGCACCTCTGGGGGCACAGCGGCCCTGGGCT
GCCTGGTCAAGGACTACTTCCCCGAACCGGTGACGGTGTCGTGGAACTCAGGCGCC
CTGACAGCGGCGTGCACACCTTCCCGGCTGTCCTACAGTCCTCAGGACTCTACTCCC
TCAGCAGCGTGGTGACAGTGCCCTCCAGCAGCTTGGGCACCCAGACCTACATCTGCA
ACGTGAATCACAAGCCCAGCAACACCAAGGTGGACAAGAGAGTTGAGCCCAAATCT
TGTGACAAAACTCACACATGCCCACCGTGCCCAGCACCTGAACTCCTGGGGGGACC
GTCAGTCTTCCTCTTCCCCCCAAAACCCAAGGACACCCTCATGATCTCCCGGACCCC
TGAGGTCACATGCGTGGTGGTGGACGTGAGCCACGAAGACCCTGAGGTCAAGTTCA
ACTGGTACGTGGACGGCGTGGAGGTGCATAATGCCAAGACAAAGCCGCGGGAGGA
GCAGTACAACAGCACGTACCGTGTGGTCAGCGTCCTCACCGTCCTGCACCAGGACTG
GCTGAATGGCAAGGAGTACAAGTGCAAGGTCTCCAACAAAGCCCTCCCAGCCCCCA
TCGAGAAAACCATCTCCAAAGCCAAAGGGCAGCCCCGAGAACCACAGGTGTACACC
CTGCCCCCATCCCGGGAGGAGATGACCAAGAACCAGGTCAGCCTGACCTGCCTGGT
CAAAGGCTTCTATCCCAGCGACATCGCCGTGGAGTGGGAGAGCAATGGGCAGCCGG
AGAACAACTACAAGACCACGCCTCCCGTGCTGGACTCCGACGGCTCCTTCTTCCTCT
ATAGCAAGCTCACCGTGGACAAGAGCAGGTGGCAGCAGGGGAACGTCTTCTCATGC
TCCGTGATGCATGAGGCTCTGCACAACCACTACACGCAGAAGAGCCTCTCCCTGTCT
CCGGGTAAATGA (SEQ ID NO: 930)
Light chain
TCCTATGTGCTGACTCAGCCACCCTCGGTGTCCGGGGCCTTGAGACAGACCGCCACA
GTCACCTGCACTGGGAACAGCAGCAATGTTGGCAACCAAGGAGCAGCTTGGCTGAG
GCAGCACCAGGGCCGCCCTCCCAAACTTCTATCTTACAGGAATAACGACCGGCCCTC
AGGGGTCTCACAGAGATTTTCTGCTTCCACGTCAGGGAACACAGCCTCCCTGACCAT
TACTGGCCTCCAGTCTGAGGACGAGGCTGACTATTTCTGCTCAGCATGGGACAGCAG
CCGCAGTGGTTGGGTCTTCGGCGGAGGGACCAAGCTGACCGTCCTAGGTGGTCAGC
CCAAGGCTGCCCCCTCGGTCACTCTGTTCCCGCCCTCCTCTGAGGAGCTTCAAGCCA
ACAAGGCCACACTGGTGTGTCTCATAAGTGACTTCTACCCGGGAGCCGTGACAGTG
GCCTGGAAGGCAGATAGCAGCCCCGTCAAGGCGGGAGTGGAGACCACCACACCCTC
CAAACAAAGCAACAACAAGTACGCGGCCAGCAGCTATCTGAGCCTGACGCCTGAGC
AGTGGAAGTCCCACAGAAGCTACAGCTGCCAGGTCACGCATGAAGGGAGCACCGTG
GAGAAGACAGTGGCCCCTACAGAATGTTCATAG (SEQ ID NO: 931)
FL-SKNAS-C2-514|B-000000402-000X
Heavy chain
GAGGTCCAGCTGGTGCAGTCTGGAGCAGAGGTGAAAGAGCCGGGGGAGTCTCTGAG
GATCTCCTGTAAGGCTTCTGGATATGACTTTTCCAACTACTGGATCGCCTGGGTGCG
CCAGATGCCCGGGAAAGGCCTGGAGTGGATGGGGATCATCTATCCTGGTGACTCTG
ATACCAGATATAGCCCGTCCTTCCAAGGCCAGGTCACCATCTCAGTCGACAGGTCCA
TCAGCACCGCCTACCTGCAGTGGAGCAGCCTGAAGGCCTCGGACACCGCCCTGTATT
ACTGTTCCAGACCTACCTATTGGAGCACCACTTGGGGGAGGGAGTTTGACTACTGGG
GCCAAGGCACCCTGGTCACCGTCTCGAGTGCCTCCACCAAGGGCCCATCGGTCTTCC
CCCTGGCACCCTCCTCCAAGAGCACCTCTGGGGGCACAGCGGCCCTGGGCTGCCTGG
TCAAGGACTACTTCCCCGAACCGGTGACGGTGTCGTGGAACTCAGGCGCCCTGACA
GCGGCGTGCACACCTTCCCGGCTGTCCTACAGTCCTCAGGACTCTACTCCCTCAGCA
GCGTGGTGACAGTGCCCTCCAGCAGCTTGGGCACCCAGACCTACATCTGCAACGTG
AATCACAAGCCCAGCAACACCAAGGTGGACAAGAGAGTTGAGCCCAAATCTTGTGA
CAAAACTCACACATGCCCACCGTGCCCAGCACCTGAACTCCTGGGGGGACCGTCAG
TCTTCCTCTTCCCCCCAAAACCCAAGGACACCCTCATGATCTCCCGGACCCCTGAGG
TCACATGCGTGGTGGTGGACGTGAGCCACGAAGACCCTGAGGTCAAGTTCAACTGG
TACGTGGACGGCGTGGAGGTGCATAATGCCAAGACAAAGCCGCGGGAGGAGCAGT
ACAACAGCACGTACCGTGTGGTCAGCGTCCTCACCGTCCTGCACCAGGACTGGCTGA
ATGGCAAGGAGTACAAGTGCAAGGTCTCCAACAAAGCCCTCCCAGCCCCCATCGAG
AAAACCATCTCCAAAGCCAAAGGGCAGCCCCGAGAACCACAGGTGTACACCCTGCC
CCCATCCCGGGAGGAGATGACCAAGAACCAGGTCAGCCTGACCTGCCTGGTCAAAG
GCTTCTATCCCAGCGACATCGCCGTGGAGTGGGAGAGCAATGGGCAGCCGGAGAAC
AACTACAAGACCACGCCTCCCGTGCTGGACTCCGACGGCTCCTTCTTCCTCTATAGC
AAGCTCACCGTGGACAAGAGCAGGTGGCAGCAGGGGAACGTCTTCTCATGCTCCGT
GATGCATGAGGCTCTGCACAACCACTACACGCAGAAGAGCCTCTCCCTGTCTCCGGG
TAAATGA (SEQ ID NO: 932)
Light chain
TCCTATGAGCTGACTCAGCCACCCTCGGTGTCAGTGTCCCCAGGACAAACGGCCACG
ATCACCTGCTCTGGAGATGCATTGCCAAAAAAATATGCTTATTGGTACCAGCAGAAG
TCAGGCCAGGCCCCTGTGCTGGTCGTCTATGAGGACAGCAAACGACCCTCCGGGAT
CCCTGAGAGATTCTCTGGCTCCAGCTCAGGGACAATGGCCACCTTGACTATCAGTGG
GGCCCAGGTGGAGGATGAAGCTGACTACTACTGTTACTCAACAGACAGCAGTGGTA
ATCATTGGGTGTTCGGCGGAGGGACCAAGCTGACCGTCCTAGGTGGTCAGCCCAAG
GCTGCCCCCTCGGTCACTCTGTTCCCGCCCTCCTCTGAGGAGCTTCAAGCCAACAAG
GCCACACTGGTGTGTCTCATAAGTGACTTCTACCCGGGAGCCGTGACAGTGGCCTGG
AAGGCAGATAGCAGCCCCGTCAAGGCGGGAGTGGAGACCACCACACCCTCCAAACA
AAGCAACAACAAGTACGCGGCCAGCAGCTATCTGAGCCTGACGCCTGAGCAGTGGA
AGTCCCACAGAAGCTACAGCTGCCAGGTCACGCATGAAGGGAGCACCGTGGAGAAG
ACAGTGGCCCCTACAGAATGTTCATAG (SEQ ID NO:933)
A673-C2-110|B-000000403-000F
Heavy chain
CAGGTCCAGCTGGTGCAGTCTGGGACTGAGGTGAAGAAGCCTGGGGCCTCAGTGAG
GGTCTCCTGTAAGCCATCTGCAGACACCTTCACCAGCTACTATGTGCACTGGGTGCG
ACAGGCCCCTGGACAAGGGCTTGAGTGGATGGGCACAATCAACCCCACCGGAACTT
ACACAAGGTACGCACAGCAGTTCCAGGGCAGAGTCACCGTGACCAGGGACACGTCC
ACGAGCTCAGTGTACATGGAATTGAGCAGCCTGAGATCTGAGGACTCGGCCGTGTA
TTATTGTGCGAGAGACGTAAGACCCTATACAGCTATGTACTCCTTTGACAACTGGGG
GCGGGGGACCACGGTCACCGTCTCGAGTGCCTCCACCAAGGGCCCATCGGTCTTCCC
CCTGGCACCCTCCTCCAAGAGCACCTCTGGGGGCACAGCGGCCCTGGGCTGCCTGGT
CAAGGACTACTTCCCCGAACCGGTGACGGTGTCGTGGAACTCAGGCGCCCTGACAG
CGGCGTGCACACCTTCCCGGCTGTCCTACAGTCCTCAGGACTCTACTCCCTCAGCAG
CGTGGTGACAGTGCCCTCCAGCAGCTTGGGCACCCAGACCTACATCTGCAACGTGA
ATCACAAGCCCAGCAACACCAAGGTGGACAAGAGAGTTGAGCCCAAATCTTGTGAC
AAAACTCACACATGCCCACCGTGCCCAGCACCTGAACTCCTGGGGGGACCGTCAGT
CTTCCTCTTCCCCCCAAAACCCAAGGACACCCTCATGATCTCCCGGACCCCTGAGGT
CACATGCGTGGTGGTGGACGTGAGCCACGAAGACCCTGAGGTCAAGTTCAACTGGT
ACGTGGACGGCGTGGAGGTGCATAATGCCAAGACAAAGCCGCGGGAGGAGCAGTA
CAACAGCACGTACCGTGTGGTCAGCGTCCTCACCGTCCTGCACCAGGACTGGCTGAA
TGGCAAGGAGTACAAGTGCAAGGTCTCCAACAAAGCCCTCCCAGCCCCCATCGAGA
AAACCATCTCCAAAGCCAAAGGGCAGCCCCGAGAACCACAGGTGTACACCCTGCCC
CCATCCCGGGAGGAGATGACCAAGAACCAGGTCAGCCTGACCTGCCTGGTCAAAGG
CTTCTATCCCAGCGACATCGCCGTGGAGTGGGAGAGCAATGGGCAGCCGGAGAACA
ACTACAAGACCACGCCTCCCGTGCTGGACTCCGACGGCTCCTTCTTCCTCTATAGCA
AGCTCACCGTGGACAAGAGCAGGTGGCAGCAGGGGAACGTCTTCTCATGCTCCGTG
ATGCATGAGGCTCTGCACAACCACTACACGCAGAAGAGCCTCTCCCTGTCTCCGGGT
AAATGA (SEQ ID NO: 934)
Light chain
TCCTATGTGCTGACTCAGCCACCCTCGGTGTCAGTGTCCCCAGGACAGACGGCCACG
ATCACCTGCTCTGGAGATGCATTGCCAAAGCAATATGCTAATTGGTACCAGCAGAA
ACCAGGCCAGGCCCCTGTGTTAATGATATATAAAGACAGTGACAGGCCCTCAGGGA
TCCCTGAGCGATTCTCTGGCTCCAGCTCAGGGACAAAAGCCACGTTGACCATCAGTG
GAGTCCAGGCAGAAGACGAGGCTGACTATTACTGTCAATCAGCAGACAACAGTGGT
ACTAATTATGTCTTCGGAACTGGGACCAAGCTGACCGTCCTAGGTGGTCAGCCCAAG
GCTGCCCCCTCGGTCACTCTGTTCCCGCCCTCCTCTGAGGAGCTTCAAGCCAACAAG
GCCACACTGGTGTGTCTCATAAGTGACTTCTACCCGGGAGCCGTGACAGTGGCCTGG
AAGGCAGATAGCAGCCCCGTCAAGGCGGGAGTGGAGACCACCACACCCTCCAAACA
AAGCAACAACAAGTACGCGGCCAGCAGCTATCTGAGCCTGACGCCTGAGCAGTGGA
AGTCCCACAGAAGCTACAGCTGCCAGGTCACGCATGAAGGGAGCACCGTGGAGAAG
ACAGTGGCCCCTACAGAATGTTCATAG (SEQ ID NO: 935)
C. CDR (Aminoacid sequence)
C.1-Binding to NRR

[chemical structure]

HCDR1 aa:
Start 26 End 33
GGTFSSFA (SEQ ID NO: 936)
HCDR2
Start 51 End 60
IIPILGRTNY (SEQ ID NO: 937)
HCDR3
Start 97 End 112|
ARDREYSLSLGGSDYW (SEQ ID NO: 938)
LCDR1
Start 26 End 34
SSNIGAGYD (SEQ ID NO: 241)
LCDR2
Start 52 End 55
ANTN (SEQ ID NO: 939)
LCDR3
Start 91 End 101|
QSYDSSLSGRV (SEQ ID NO: 940)

[chemical structure]

HCDR1 aa:
Start 28 End 35
GFSFDNY (SEQ ID NO: 941)
HCDR2
Start 53 End 62
ISGSGGQIFY (SEQ ID NO: 942)
HCDR3
Start 99 End 115|
ARDFYRTPGYNTNWGYW (SEQ ID NO: 943)
LCDR1
Start 26 End 31
GLGNKY (SEQ ID NO: 944)
LCDR2
Start 49 End 52
QDSK (SEQ ID NO: 945)
LCDR3
Start 88 End 96|
QAWDRPAVI (SEQ ID NO: 946)
C.2-Additional Notch Antibodies

[chemical structure]

HCDR1 aa:
Start 26 End 33
HCDR2
Start 51 End 60
ISGSGGSTYY (SEQ ID NO: 947)
HCDR3
Start 97 End 109|
ARHGHSSGYFVYW (SEQ ID NO: 948)
LCDR1
Start 26 End 34
SSNIGAPYD (SEQ ID NO: 949)
LCDR2
Start 52 End 55
GNTN (SEQ ID NO: 950)
LCDR3
Start 91 End 101|
QSYDHSLSGWV (SEQ ID NO: 951)

[chemical structure]

HCDR1
Start 26 End 33
HCDR2
Start 51 End 60
ISGSGGSTYY (SEQ ID NO: 952)
HCDR3
Start 97 End 114|
ARSQLPYCGGDCYGSDYW (SEQ ID NO: 953)
LCDR1
Start 26 End 31
KLGDKY (SEQ ID NO: 880)
LCDR2
Start 49 End 52
KDSE (SEQ ID NO: 954)
LCDR3
Start 88 End 95|
QAWDSGAV (SEQ ID NO: 955)

[chemical structure]

HCDR1
Start 26 End 33
GYTFTDYY (SEQ ID NO: 267)
HCDR2
Start 51 End 60
LNPNSGGTNY (SEQ ID NO: 956)
HCDR3
Start 97 End 118|
ARGYDYVWGTSRYVADAFDIW (SEQ ID NO: 957)
LCDR1
Start 26 End 33
SSNIGSNT (SEQ ID NO: 226)
LCDR2
Start 51 End 54
NNDQ (SEQ ID NO: 958)
LCDR3
Start 90 End 100|
ASWDDSLNGRV (SEQ ID NO: 303)

[chemical structure]

HCDR1
Start 26 End 33
GGTLSSSA (SEQ ID NO: 959)
HCDR2
Start 51 End 60
IIPMFDSTNY (SEQ ID NO: 960)
HCDR3
Start 97 End 114|
GRDPYYDRLSGGGYMDVW (SEQ ID NO: 961)
LCDR1
Start 26 End 33
SSNVGNQG (SEQ ID NO: 962)
LCDR2
Start 51 End 54
RNND (SEQ ID NO: 963)
LCDR3
Start 90 End 100|
SAWDSSRSGWV (SEQ ID NO: 964)

[chemical structure]

HCDR1
Start 26 End 33
GYDFSNYW (SEQ ID NO: 965)
HCDR2
Start 51 End 60
IYPGDSDTRY (SEQ ID NO: 966)
HCDR3
Start 97 End 113|
SRPTYWSTTWGREFDYW (SEQ ID NO: 967)
LCDR1
Start 26 End 31
ALPKKY (SEQ ID NO: 968)
LCDR2
Start 49 End 52
EDSK (SEQ ID NO: 969)
LCDR3
Start 88 End 98|
YSTDSSGNHWV (SEQ ID NO: 970)

[chemical structure]

HCDR1
Start 26 End 33
ADTFTSYY (SEQ ID NO: 971)
HCDR2
Start 51 End 60
INPTGTYTRY (SEQ ID NO: 972)
HCDR3
Start 97 End 112|
ARDVRPYTAMYSFDNW (SEQ ID NO: 973)
LCDR1
Start 26 End 31
ALPKQY (SEQ ID NO: 974)
LCDR2
Start 49 End 52
KDSD (SEQ ID NO: 975)
LCDR3
Start 88 End 98|
QSADNSGTNYV (SEQ ID NO: 976)

What is claimed is:

1. An isolated or purified Notch1-specific antibody molecule or an antigen binding portion thereof comprising at least one light chain sequence comprising a sequence of amino acids selected from the group consisting of SEQ ID NOS. 23-42 or 46-48 and at least one heavy chain sequence comprising a sequence of amino acids selected from the group consisting of SEQ ID NOS. 3-22 or 43-45, or at least one light chain comprising an amino acid sequence having at least 80% identity with the sequence set forth in any one or more of SEQ ID NOS. 23-42 or 46-48, and wherein said heavy chain comprises an amino acid sequence or at least one heavy chain comprising an amino acid sequence having at least 80% identity with one of SEQ ID NOS. SEQ ID NOS. 3-22 or 43-45.

2. The antigen-binding portion according to claim 1, wherein said portion is selected from the group consisting of: a Fab fragment, an F(ab′)₂ fragment and an Fv fragment.

3. An isolated or purified Notch1-specific antibody molecule comprising a heavy chain variable region comprising the amino acid sequence as set forth in one of SEQ ID NOs. 3-22 or 43-45 or a glycosylation variant, fusion molecule or a chemical derivative thereof or an antigen-binding region thereof that specifically binds Notch1.

4. The antibody of claim 1 or 3 that comprises a mutant immunoglobulin chain, the mutant antibody having higher affinity for an antigen than a parent antibody that comprises a parent immunoglobulin chain, wherein the mutant immunoglobulin chain comprises an amino acid substitution that eliminates a variable region glycosylation site of the parent immunoglobulin chain, said elimination having the effect of increasing the affinity of the mutant antibody relative to the parent antibody.

5. A cell line that produces the antibody as set forth in claim 1.

6. A method for diagnosing an oncogenic disorder associated with expression of Notch1 or determining the prognosis for developing an oncogenic disorder associated with expression of Notch1 in a subject comprising contacting a sample from the subject with the monoclonal antibody of claim 1, and detecting the binding of the monoclonal antibody with the sample, wherein binding of the monoclonal antibody to the sample is indicative of the diagnosis of said neoplasia.

7. The method according to claim 6, wherein said antibody is labeled.

8. A method of detecting the presence or location of an Notch1-expressing tumor in a subject, comprising the steps of: a) administering the antibody according to claim 1 to the subject; and b) detecting binding of said antibody, wherein said binding indicates the presence or location of the tumor.

9. A method for determining the prognosis of the course of a malignant disease associated with expression of Notch1, comprising obtaining a sample from a subject suspected of containing tumor cells, contacting said sample with the antibody of claim 1 or an antigen-binding fragment thereof, wherein binding of the antibody or the antigen-binding fragment thereof with tumor cells in the sample is indicative of a tumor and gives a prognoses for the course of a malignant disease in said subject.

10. A method for selecting a therapy for a patient or a patient population with a tumor associated with or mediated by expression of Notch1 comprising: (a) determining whether the patient's tumor is known to over express Notch1 bearing cells relative to normal and (b) selecting an Notch1 inhibitory agent as the therapy if the patient's tumor is known to over express said Notch1.

11. The method of claim 10, wherein the agent is: (i) the isolated antibody or antigen-binding fragment thereof according to claim 1.

12. A method for following progress of a therapeutic regime designed to alleviate an oncogenic disorder associated with or characterized by expression of Notch1 comprising:
(a) assaying a biological sample from a subject to determine level of Notch1 at a first time point by contacting said sample with the antibody according to claim 1;
(b) assaying level of Notch1 at a second time point; and
(c) comparing said level at said second time point to the level determined in (a) as a determination of effect of said therapeutic regime.

13. A method for determining the expression of Notch1 (a) in a test tissue sample suspected of containing said polypeptide and (b) a control normal tissue sample of the same tissue type, said method comprising exposing the test and control tissue samples to the anti-Notch1 antibody of claim 1 and determining the relative binding of said antibody to said polypeptide in each of said samples.

14. The method according to claim 13, further comprising quantifying the level of Notch1 expression in said control sample to obtain a normal or control value and comparing the same to the level obtained in the test tissue sample to determine the overall expression of Notch1 in said test tissue sample.

15. A method for determining the prognosis for survival for a patient presenting with a cancer mediated by Notch1, comprising: (a) measuring a level of Notch1 receptor polypeptide in a cancer cell-containing sample from said patient, and (b) comparing the level of Notch1 receptor polypeptide in said sample to a reference level of Notch1 polypeptide from normal tissue, wherein a lower level of Notch1 polypeptide relative to said reference level correlates with increased survival of said patient, wherein step (a) using the antibody of claim 1.

16. A method for prognostic evaluation of a patient suspected of exhibiting an oncogenic disorder associated with expression of Notch1 comprising: (a) determining the concentration of Notch1 present in a biological sample, taken from the patient, suspected of containing oncogenic tissue; (b) comparing the level determined in step (a) to the concentration range of Notch1 polypeptide known to be present in normal, non-oncogenic tissue of the same type as present in the biological sample; and (c) evaluating the prognosis of said patient based on the comparison in step (b), wherein a high level of Notch1 expression in step (a) indicates an aggressive form of cancer and therefore a poor prognosis., wherein step (a) comprises contacting said biological sample with the antibody of claim 1.

17. The method according to claim 16 further comprising a step prior to step (a) comprising purifying said Notch1 polypeptide from the biological sample.

18. The method of claim 17 wherein the purifying method is immunoaffinity chromatography.

19. A method for determining the prognosis of an individual with an oncogenic disorder or a susceptibility to a pathological hyperproliferative disorder associated with expression of Notch1 in a subject, comprising: a) determining the expression levels of Notch1 in a biological sample collected from said patient in different states of the individual; and b) comparing the expression profile of Notch1 in the different states, wherein a higher level of the expression in a later state sample compared with an early state sample indicates a poor prognosis, wherein step (a) comprises contacting said biological sample with the antibody of claim 1.

20. A method of detecting a pathological hyperproliferative oncogenic disorder associated with expression of Notch1 in a subject comprising: a) determining the level of expression of Notch1 in a first tissue sample obtained from said first individual; and b) comparing said level obtained in step (a) with that of a normal tissue sample obtained from said first individual or a second unaffected individual; wherein a difference in said expression of Notch1 is an indication that the first individual may present have said pathological hyperproliferative oncogenic disorder, wherein step (a) comprises contacting said biological sample with the antibody of claim 1.

21. The method according to claim 20, wherein said difference is an increase in the expression level of Notch1 relative to the normal tissue.

22. A method for determining onset, progression, or regression, of an oncogenic disorder associated with expression of Notch1 in a subject, comprising:
(i) (a) obtaining from a subject a first biological sample,
(b) contacting the first sample with a therapeutically effective amount of a therapeutic anti-Notch1 antibody sufficient to down regulate Notch1 expression, wherein said antibody is other than the antibody of claim 1;
(c) determining specific binding between the antibody in the first sample and Notch1 bearing cells,
(ii) (a) obtaining subsequently from the subject a second biological sample,
(b) contacting the second biological sample with the antibody of claim 1,
(c) determining specific binding between the antibody in the second sample and Notch1 bearing cells, and
(iii) comparing the determination of binding in the first sample to the determination of specific binding in the second sample as a determination of the onset, progression, or regression of the neoplasia.

23. A method for monitoring the efficacy of an antibody in correcting an abnormal level of Notch1 in a subject presenting with an oncogenic disorder associated with increased of Notch1, comprising
i) administering an effective amount of a conventional Notch1 antibody other than the antibody of claim 1 to said subject; and
ii) determining a level of Notch1 in said subject following the administration of the conventional antibody, wherein a change in the level of Notch1 towards a normal level is indicative of the efficacy of said antibody.

24. The method according to claim 23 wherein step (ii) comprises contacting a tissue sample obtained from said subject with the antibody according to claim 1 under conditions favoring the formation of a complex between Notch1 expressing cells and said antibody and detecting said complex as a determination of the expression level of Notch1 in said sample.

25. The method as claimed in claim 13, wherein said antibody comprises a detectable label.

26. The method as claimed in claim 25, wherein said detectable label is selected from the group consisting of fluorescein, rhodamine, phycoerythrin, biotin, and strepavidin.

27. The method as claimed in claim 26, wherein said antibody is detected by a method selected from the group consisting of flow cytometric analysis, immunochemical detection and immunoblot analysis.

28. The method of claim 27, wherein said antibody or fragment is in solution.

29. The method as claimed in claim 28, wherein said biological sample comprises soft tissue tumor cells and non-malignant cells.

30. An article of manufacture, comprising: a container; a label on the container; and a composition comprising an active agent contained within the container, wherein the composition is effective for detecting Notch1 in neoplastic tissue or dysplastic cells and wherein the label on the container indicates that the composition is effective for diagnosing conditions associated with expression of Notch1 polypeptide in said neoplastic tissue compared to normal tissue.

31. The article of manufacture according to claim 30, wherein said active ingredient comprises the antibody according to claim 1.

32. An in vivo method of imaging an oncogenic disorder associated with expression of Notch1 comprising the steps of:
(a) administering to a subject an imaging-effective amount of the labeled monoclonal antibody according to claim 1 or fragment thereof and a pharmaceutically effective carrier; and
(b) detecting the binding of said labeled monoclonal antibody or fragment thereof to Notch1 expressing cells associated with said disorder.

33. The method of claim 32, wherein said monoclonal antibody or fragment thereof is radiolabeled.

34. The method of claim 33, wherein said detecting involves radioactive imaging.

35. A method for determining whether a cancer is susceptible to treatment with an anti-neoplastic agent comprising the steps of: (a) obtaining a sample of the cancer, (b) measuring the level of Notch1 in the sample, (c) comparing the level with a predetermined value, and (d) determining that, if the measured level is larger than the predetermined value, the cancer is susceptible to treatment with the anti-neoplastic agent, wherein step (a) comprises contacting said biological sample with the antibody of claim 1.

36. A pharmaceutical composition for in vivo imaging of an oncogenic disorder associated with expression of Notch1 comprising the monoclonal antibody of claim 1 or an antigen binding fragment thereof which is labeled and which binds Notch1 in vivo; and a pharmaceutically acceptable carrier.

37. A method for detecting Notch1 or one of its isoforms or a fragment thereof in a biological sample, comprising: (a) contacting said biological sample the antibody of claim 1 thereby forming an antibody-polypeptide complex; and (b) detecting said antibody-polypeptide complex as indicating presence of said Notch1 in said sample.

38. The method according to claim 37, wherein said antibody is detectably labeled.

39. The method of claim 37 in which step (b) comprises an immunoassay, wherein said immunoassay is selected from the group comprising: direct, indirect, capture, competitive binding, and displacement.

40. The method of claim 37 in which said step of detecting the presence of Notch1 comprises a qualitative analysis.

41. The method of claim 37 in which said step of detecting the presence of Notch1 comprises a quantitative analysis.

42. The method of claim 39 in which said binding assay comprises a clinical diagnostic assay.

43. The method of claim 42 which is of the type selected from the group consisting of: IFA, linear flow, radial flow, Western Blot, ELISA, dip stick, EIA, fluorescent polarization, enzyme capture, and RIA.

44. A method for diagnosing an oncogenic disorder associated with expression of Notch1 comprising: a) measuring by radioimmunoassay, competitive-binding assay, Western blot analysis, ELISA assay, or sandwich assay the amount of Notch1 protein in a sample obtained from a patient, using an antibody that specifically binds to Notch1; and b) comparing the amount of antibody bound to said Notch1 protein to a normal control tissue sample, wherein increased expression or over-expression of Notch1 in the sample obtained from the patient relative to the normal control tissue sample is diagnostic of an oncogenic disorder associated with expression of Notch1, wherein said antibody is as described in claim 1.

45. The method of claim 44, wherein said sample obtained from a patient is tissue biopsy.

46. A diagnostic or monitoring method comprising: a) obtaining a sample of tissue from an individual in need of diagnosis or monitoring for cancer; b) detecting levels of Notch1 protein in said sample, c) scoring said sample for Notch1 protein levels; and d) comparing said scoring to that obtained from a control tissue sample to determine the prognosis associated with said cancer, wherein step (b) comprises contacting said tissue sample with the antibody of claim 1.

47. The diagnostic or monitoring method according to claim 46, wherein said scoring comprises using a scale of 0 to 4, where 0 is negative (no detectable Notch1 or level of Notch1 comparable to a control level), and 4 is high intensity staining in the majority of cells and wherein a score of 1 to 4 indicates a poor prognosis while a score of 0 indicates a good prognosis.

48. The diagnostic or monitoring method according to claim 47, wherein the detecting or measuring step is selected from the group of methods consisting of immunoblotting, immunohistochemistry and immunocytochemistry.

49. The diagnostic or monitoring method according to claim 46 wherein the step b) is done by Fluorescence-Activated Cell Sorting (FACS).

50. A method for determining a chemotherapeutic regimen comprising an Notch1 targeted agent, for treating a tumor in a patient comprising: (a) obtaining a tissue sample of the tumor; (b) detecting levels of Notch1 levels in said sample, (c) scoring said sample for expression of Notch1 levels, (d) repeating steps (b)-(c) in a matching non-malignant tissue sample to obtain a threshold level (e) determining a chemotherapeutic regimen by comparing the differential Notch1 expression level of step (c) and the threshold level of step (d), wherein an increase in differential Notch1 expression level in step (c) relative to step (d) dictate placing said patient in the chemotherapeutic regimen wherein step (b) comprises contacting said tissue sample with the antibody of claim 1.

51. The method according to claim 50, wherein said scoring comprises using a scale of 0 to 4, where 0 is negative (no detectable Notch1 or level of Notch1 comparable to a control level), and 4 is high intensity staining in the majority of cells and wherein a score of 1 to 4 (i.e. a positive score) indicates chemotherapeutic regimen.

52. A method for predicting disease-free survival and overall survival in a patient with an oncogenic disorder associated with Notch1 expression comprising: a) obtaining a sample of diseased or cancerous tissue from an individual presenting with said oncogenic disorder, b) detecting levels of Notch1 expressing cells in said cancer cells or cancer tissue of said sample; c) scoring said samples for expression of Notch1 levels; and d) comparing said scoring to that obtained from a control sample to determine likelihood of disease-free survival and overall survival associated with Notch1, wherein step (b) comprises contacting said tissue sample with the antibody of claim 1.

53. The method according to claim 52, wherein said scoring comprises using a scale of 0 to 4, where 0 is negative (no detectable Notch1 or level of Notch1 comparable to a control level), and 4 is high intensity staining in the majority of cells and wherein a score of 1 to 4 (i.e. a positive score) indicates a poor prognosis for disease free and overall survival in patients with said disorder.

54. A method for treating an Notch1 mediated cancer comprising: a) obtaining a sample of diseased tissue from a patient in need of treatment of said cancer; b) determining the level of expression of Notch1 levels in said tissue sample; c) scoring said samples for expression of Notch1 levels; d) correlating said score to identify patients likely to benefit from treatment with an Notch1 antagonist, wherein said step of correlating comprises comparing said scoring to that obtained from a control sample, e) treating said patient with a therapeutic regime known to improve the prognosis for said cancer; f) repeating steps “a” and “b”, and g) adjusting the therapeutic regime known to improve the prognosis for said cancer; h) repeating steps a-f as frequently as deemed appropriate, wherein step (b) comprises contacting said tissue sample with the antibody of claim 1.

55. The method according to claim 54, wherein said scoring comprises using a scale of 0 to 4, where 0 is negative (no detectable Notch1 or level of Notch1 comparable to a control level), and 4 is high intensity staining in the majority of cells.

56. A method of treating a Notch1 mediated disorder comprising administrating to a patient in need thereof the antibody of claim 1 sufficient to treat said disorder, wherein said antibody is an agonist antibody specific for Notch1.

57. A method of treating a Notch1 mediated disorder comprising administrating to a patient in need thereof the antibody of claim 1 sufficient to treat said disorder, wherein said antibody is an antagonist agonist antibody specific for Notch1.

58. A method for determining the effect of a therapeutic regimen for alleviating an Notch1 mediated disorder, wherein said regimen comprises the use of an Notch1 antagonist, the method comprising the steps of: a) obtaining a cell or tissue sample from an individual undergoing said therapeutic regimen b) measuring the levels of Notch1 in said cell or tissue sample; c) scoring said sample for Notch1 protein levels, and d) comparing said levels to that of a control sample to predict the responsiveness of said Notch1 mediated disorder to said therapeutic regimen, wherein step (b) comprises contacting said tissue sample with the antibody of claim 1.

59. A method for stratifying a patient presenting with an oncogenic disorder mediated by Notch1 for a clinical trial comprising: a) obtaining a tissue sample from said patient, b) detecting levels of Notch1 protein in said sample, c) scoring said sample for Notch1 protein levels; and d) stratifying said patient for said clinical trial based on the results of the scoring step, wherein step (b) comprises contacting said tissue sample with the antibody of claim 1.

60. The method according to claim 59, wherein said scoring comprises using a scale of 0 to 4, where 0 is negative (no detectable Notch1 or level of Notch1 comparable to a control level), and 4 is high intensity staining in the majority of cells.

61. A method of classifying or staging a breast tumor characterized by expression of Notch1 comprising the steps of: i) providing a breast tumor sample, ii) detecting expression Notch1 in the sample, iii) scoring the sample for Notch1 expression level, and iv) classifying the tumor as belonging to a tumor subclass based on the results of the scoring step, wherein step ii) comprises contacting said tissue sample with the antibody of claim 1.

62. The method according to claim 61, wherein said scoring comprises using a scale of 0 to 4, where 0 is negative (no detectable Notch1 or level of Notch1 comparable to a control level), and 4 is high intensity staining in the majority of cells.

63. A method of treating a human tumor susceptible to an antibody induced cellular cytotoxicity in a mammal, wherein said human tumor expresses an antigen which specifically binds to the monoclonal antibody which has the cellular cytotoxicity inducing characteristics of said antibody of claim 1 or a cellular cytotoxicity inducing antigen binding fragment thereof, comprising administering to said mammal said antibody or said antigen binding fragment thereof in an amount effective to induce cellular cytotoxicity and thereby reduce said mammal's tumor burden.

64. The method of claim 63 wherein said antibody is conjugated to a cytotoxic moiety.

65. The method of claim 63, wherein said cytotoxic moiety is a radioactive isotope.

66. The method of claim 63 wherein said antibody activates complement.

67. The method of claim 63 wherein said antibody mediates antibody dependent cellular cytotoxicity.

68. The isolated antibody or antigen binding fragment of any one of claim 1 or 3 conjugated with a member selected from the group consisting of cytotoxic moieties, enzymes, radioactive compounds, and hematogenous cells.

69. The isolated antibody according to claim 1 wherein said antibody is a multivalent antibody.

70. The antibody according to claim 69, wherein said antibody is a bispecific, tetravalent antibody specific for Notch1.

71. The isolated antibody of claim 1 which comprises an antigen binding region and a variant Fe region, wherein said variant Fc region: (A) differs from a wild-type Fe region by comprising an amino acid modification and (B) binds an FcγR with an increased affinity relative to a said wild-type Fc region.

72. The antibody according to claim 71 wherein said FcγR is FcγRIIIA.

73. The antibody according to claim 72, wherein said variant Fc region of said antibody has decreased affinity for FcγRIIB relative to said wild-type Fc region.

74. A variant antibody derived from the antibody of claim 1, wherein said antibody comprises an Fc region, said variant mediates antibody-dependent cell-mediated cytotoxicity (ADCC) in the presence of human effector cells more effectively, or binds an Fc gamma receptor (FcγR) with better affinity, than the parent polypeptide and comprises at least one amino acid modification in the Fc region.

75. A method of treating a human tumor susceptible to antibody induced cellular cytotoxicity in a mammal, wherein said human tumor expresses a Notch1 receptor which specifically binds to a monoclonal antibody which has the cellular cytotoxicity inducing characteristics of the antibody of claim 1, comprising administering to said mammal said monoclonal antibody or said antigen binding fragment thereof in an amount effective to induce cellular cytotoxicity and thereby reduce said mammal's tumor burden.

76. The method of claim 75 wherein said monoclonal antibody is conjugated to a cytotoxic moiety.

77. The method of claim 76 wherein said cytotoxic moiety is a radioactive isotope.

78. The method of claim 77 wherein said monoclonal antibody activates complement.

79. The method of claim 78 wherein said monoclonal antibody mediates antibody dependent cellular cytotoxicity.

80. The isolated antibody or antigen binding fragments of claim 1 conjugated with a member selected from the group consisting of cytotoxic moieties, enzymes and radioactive compounds.

81. A Notch1 antibody variant derived from the antibody of claim 1 comprising an Fc region, which variant mediates antibody-dependent cell-mediated cytotoxicity (ADCC) in the presence of human effector cells more effectively, or binds an Fc gamma receptor (FcγR) with better affinity, than the parent polypeptide and comprises at least one amino acid modification in the Fc region.

82. A Notch1 antibody or variant thereof derived from the antibody of claim 1 or 3 which recognizes mutations in the negative regulatory region (NRR), wherein said mutations within said NRR are as set forth in FIG. 12A.

83. The antibody according to claim 82, wherein said antibody is WC-12.

The application's sequence listing, which the Patent Office published only in electronic form, follows.

SEQUENCE LISTING (976 sequences)

SEQ ID NO: 1 - DNA, 7695 bp, Homo Sapien
atgccccccctgctggcccccctgctgtgcctggccctgctgcctgccctggctgcccggggcccccggtgctcccagcctggcgagacctgcctgaatggcggcaagtgtgaggctgccaatggcacagaggcctgtgtctgtggcggcgcctttgtgggcccccggtgccaggaccccaacccatgcctgagcaccccatgcaagaatgctggcacctgccatgtggtggaccggcggggcgtggctgactatgcctgctcctgtgccctgggcttctctggccccctgtgcctgacccccctggacaatgcctgcctgaccaacccatgccggaatggcggcacctgtgacctgctgaccctgacagagtacaagtgccggtgcccccctggctggtctggcaagagctgccagcaggctgacccatgtgcctccaacccatgtgccaatggcggccagtgcctgccatttgaggccagctacatctgccactgccccccatccttccatggccccacctgccggcaggatgtgaatgagtgtggccagaagcctggcctgtgccggcatggcggcacctgccacaatgaggtgggcagctaccggtgtgtctgccgggccacccacacaggccccaactgtgagcggccatatgtgccatgctccccaagcccatgccagaatggcggcacctgccggcccacaggcgatgtgacccatgagtgtgcctgcctgcctggcttcacaggccagaactgtgaggagaacattgatgactgccctggcaacaactgcaagaatggcggcgcctgtgtggatggcgtgaacacctacaactgccggtgcccccctgagtggacaggccagtactgcacagaggatgtggatgagtgccagctgatgcccaatgcctgccagaatggcggcacctgccacaacacccatggcggctacaactgtgtctgtgtgaatggctggacaggcgaggactgctctgagaacattgatgactgtgcctctgctgcctgcttccatggcgccacctgccatgaccgggtggcctccttctactgtgagtgcccccatggccggacaggcctgctgtgccatctgaatgatgcctgcatcagcaacccatgcaatgagggctccaactgtgacaccaaccctgtgaatggcaaggccatctgcacctgcccatctggctacacaggccctgcctgctcccaggatgtggatgagtgcagcctgggcgccaacccatgtgagcatgctggcaagtgcatcaacaccctgggctcctttgagtgccagtgcctgcaaggctacacaggcccccggtgtgagattgatgtgaatgagtgtgtcagcaacccatgccagaatgatgccacctgcctggaccagattggcgagttccagtgcatctgcatgcctggctatgagggcgtgcactgtgaggtgaacacagatgagtgtgcctccagcccatgcctgcacaatggccggtgcctggacaagatcaatgagttccagtgtgagtgccccacaggcttcacaggccatctgtgccagtatgatgtggatgagtgtgcctccaccccatgcaagaatggcgccaagtgcctggatggccccaacacctacacctgtgtctgcacagagggctacacaggcacccactgtgaggtggacattgatgagtgtgaccctgacccatgccactatggcagctgcaaggatggcgtggccaccttcacctgcctgtgccggcctggctacacaggccatcactgtgagaccaacatcaatgagtgctccagccagccatgccggcatggcggcacctgccaggaccgggacaatgcctacctgtgcttctgcctgaagggcaccacaggccccaactgtgagatcaacctggatgactgtgcctcctccccatgtgactctggcacctgcctggacaagattgatggctatgagtgtgcctgtgagcctggctacacaggcagcatgtgcaacatcaacattgatgagtgtgctggcaacccatgccacaatggcggcacctgtgaggatggcatcaatggcttcacctgccggtgccctgagggctaccatgaccccacctgcctgtctgaggtgaatgagtgcaactccaacccatgtgtgcatggcgcctgccgggacagcctgaatggctacaagtgtgactgtgaccctggctggtctggcaccaactgtgacatcaacaacaatgagtgtgagtccaacccatgtgtgaatggcggcacctgcaaggacatgacctctggctatgtctgcacctgccgggagggcttctctggccccaactgccagaccaacatcaatgagtgtgccagcaacccatgcctgaaccagggcacctgcattgatgatgtggctggctacaagtgcaactgcctgctgccatacacaggcgccacctgtgaggtggtgctggccccatgtgccccatccccatgccggaatggcggcgagtgccggcagtctgaggactatgagagcttctcctgtgtctgccccacaggctggcaggctggccagacctgtgaggtggacatcaatgagtgtgtgctgagcccatgccggcatggcgcctcctgccagaacacccatggcggctaccggtgccactgccaggctggctactctggccggaactgtgagacagacattgatgactgccggcccaacccatgccacaatggcggctcctgcacagatggcatcaacacagccttctgtgactgcctgcctggcttccggggcaccttctgtgaggaggacatcaatgagtgtgcctctgacccatgccggaatggcgccaactgcacagactgtgtggacagctacacctgcacctgccctgctggcttctctggcatccactgtgagaacaacacccctgactgcacagagtccagctgcttcaatggcggcacctgtgtggatggcatcaactccttcacctgcctgtgcccccctggcttcacaggcagctactgccagcatgatgtgaatgagtgtgactcccagccatgcctgcatggcggcacctgccaggatggctgtggcagctaccggtgcacctgcccccagggctacacaggccccaactgccagaacctggtgcactggtgtgactccagcccatgcaagaatggcggcaagtgctggcagacccacacccagtaccggtgtgagtgcccatctggctggacaggcctgtactgtgatgtgccatctgtctcctgtgaggtggctgcccagcggcagggcgtggatgtggcccggctgtgccagcatggcggcctgtgtgtggatgctggcaacacccatcactgccggtgccaggctggctacacaggcagctactgtgaggacctggtggatgagtgctccccaagcccatgccagaatggcgccacctgcacagactacctgggcggctactcctgcaagtgtgtggctggctaccatggcgtgaactgctctgaggagattgatgagtgcctgagccatccatgccagaatggcggcacctgcctggacctgcccaacacctacaagtgctcctgcccccggggcacccagggcgtgcactgtgagatcaatgtggatgactgcaacccccctgtggaccctgtcagccggtcccccaagtgcttcaacaatggcacctgtgtggaccaggtgggcggctactcctgcacctgcccccctggctttgtgggcgagcggtgtgagggcgatgtgaatgagtgcctgagcaacccatgtgatgcccggggcacccagaactgtgtgcagcgggtgaatgacttccactgtgagtgccgggctggccacacaggccggcggtgtgagtctgtgatcaatggctgcaagggcaagccatgcaagaatggcggcacctgtgctgtggcctccaacacagcccggggcttcatctgcaagtgccctgctggctttgagggcgccacctgtgagaatgatgcccggacctgtggcagcctgcggtgcctgaatggcggcacctgcatctctggcccccggtcccccacctgcctgtgcctgggcccattcacaggccctgagtgccagttccctgccagctccccatgcctgggcggcaacccatgctacaaccagggcacctgtgagcccacctctgagtccccattctaccggtgcctgtgccctgccaagttcaatggcctgctgtgccacatcctggactacagctttggcggcggcgctggccgggacatccccccccccctgattgaggaggcctgtgagctgcctgagtgccaggaggatgctggcaacaaggtctgctccctccagtgcaacaaccatgcctgtggctgggatggcggcgactgctccctgaacttcaatgacccatggaagaactgcacccagagcctgcaatgctggaagtacttctctgatggccactgtgactcccagtgcaactctgctggctgcctgtttgatggctttgactgccagcgggctgagggccagtgcaaccccctgtatgaccagtactgcaaggaccacttctctgatggccactgtgaccagggctgcaactctgctgagtgtgagtgggatggcctggactgtgctgagcatgtgcctgagcggctggctgctggcaccctggtggtggtggtgctgatgccccctgagcagctgcggaacagctccttccacttcctgcgggagctgtcccgggtgctgcacaccaatgtggtcttcaagcgggatgcccatggccagcagatgatcttcccatactatggccgggaggaggagctgcggaagcatcccatcaagcgggctgctgagggctgggctgcccctgatgccctgctgggccaggtgaaggccagcctgctgcctggcggctctgagggcggccggcggcggcgggagctggaccccatggatgtgcggggctccattgtctacctggagattgacaaccggcagtgtgtgcaggccagctcccagtgcttccagtctgccacagatgtggctgccttcctgggcgccctggccagcctgggcagcctgaacatcccatacaagattgaggctgtgcagtctgagacagtggagccccccccccctgcccagctgcacttcatgtatgtggctgctgctgcctttgtgctgctgttctttgtgggctgtggcgtgctgctgtcccggaagcggcggcggcagcatggccagctgtggttccctgagggcttcaaggtctctgaggcctccaagaagaagcggcgggagcccctgggcgaggactctgtgggcctgaagcccctgaagaatgcctctgatggcgccctgatggatgacaaccagaatgagtggggcgatgaggacctggagaccaagaagttccggtttgaggagcctgtggtgctgcctgacctggatgaccagacagaccatcggcagtggacccagcagcatctggatgctgctgacctgcggatgtctgccatggcccccacccccccccagggcgaggtggatgctgactgcatggatgtgaatgtgcggggccctgatggcttcacccccctgatgattgccagctgctctggcggcggcctggagacaggcaactctgaggaggaggaggatgcccctgctgtgatctctgacttcatctaccagggcgcctccctgcacaaccagacagaccggacaggcgagacagccctgcatctggctgcccggtacagccggtctgatgctgccaagcggctgctggaggcctctgctgatgccaacatccaggacaacatgggccggacccccctgcatgctgctgtctctgctgatgcccagggcgtcttccagatcctgatccggaaccgggccacagacctggatgcccggatgcatgatggcaccacccccctgatcctggctgcccggctggctgtggagggcatgctggaggacctgatcaactcccatgctgatgtgaatgctgtggatgacctgggcaagtctgccctgcactgggctgctgctgtgaacaatgtggatgctgctgtggtgctgctgaagaatggcgccaacaaggacatgcagaacaaccgggaggagacccccctgttcctggctgcccgggagggcagctatgagacagccaaggtgctgctggaccactttgccaaccgggacatcacagaccacatggaccggctgccccgggacattgcccaggagcggatgcatcatgacattgtgcggctgctggatgagtacaacctggtgcggtccccccagctgcatggcgcccccctgggcggcacccccaccctgtccccccccctgtgcagccccaatggctacctgggctccctgaagcctggcgtgcagggcaagaaggtgcggaagccaagctccaagggcctggcctgtggctccaaggaggccaaggacctgaaggcccggcggaagaagtcccaggatggcaagggctgcctgctggactccagcggcatgctgtcccctgtggacagcctggagtccccccatggctacctgtctgatgtggccagcccccccctgctgccatccccattccagcagtccccatctgtgcccctgaaccatctgcctggcatgcctgacacccatctgggcattggccatctgaatgtggctgccaagcctgagatggctgccctgggcggcggcggccggctggcctttgagacaggccccccccggctgagccatctgcctgtggcctctggcacctccacagtgctgggcagctcctctggcggcgccctgaacttcacagtgggcggctccaccagcctgaatggccagtgtgagtggctgtcccggctgcaatctggcatggtgcccaaccagtacaaccccctgcggggctctgtggcccctggccccctgtccacccaggccccaagcctgcaacatggcatggtgggccccctgcactccagcctggctgcctctgccctgtcccagatgatgtcctaccagggcctgccaagcacccggctggccacccagccccatctggtgcagacccagcaggtgcagccccagaacctgcaaatgcagcagcagaacctgcaacctgccaacatccagcagcagcagtccctccagcccccccccccccccccccagccccatctgggcgtcagctctgctgcctctggccatctgggccggtccttcctgtctggcgagccaagccaggctgatgtgcagcccctgggcccatcctccctggctgtgcacaccatcctgccccaggagagccctgccctgcccacctccctgccaagctccctggtgccccctgtgacagctgcccagttcctgacccccccatcccagcactcctactccagccctgtggacaacaccccatcccatcagctccaggtgcctgagcatccattcctgaccccaagccctgagtcccctgaccagtggtccagctcctccccccacagcaatgtctctgactggtctgagggcgtctcctccccccccaccagcatgcagtcccagattgccagaatccctgaggccttcaaggattacaaggacgacgatgacaagtaa

SEQ ID NO: 2 - protein, 2564 aa, Homo Sapien
MPPLLAPLLCLALLPALAARGPRCSQPGETCLNGGKCEAANGTEACVCGGAFVGPRCQDPNPCLSTPCKNAGTCHVVDRRGVADYACSCALGFSGPLCLTPLDNACLTNPCRNGGTCDLLTLTEYKCRCPPGWSGKSCQQADPCASNPCANGGQCLPFEASYICHCPPSFHGPTCRQDVNECGQKPGLCRHGGTCHNEVGSYRCVCRATHTGPNCERPYVPCSPSPCQNGGTCRPTGDVTHECACLPGFTGQNCEENIDDCPGNNCKNGGACVDGVNTYNCRCPPEWTGQYCTEDVDECQLMPNACQNGGTCHNTHGGYNCVCVNGWTGEDCSENIDDCASAACFHGATCHDRVASFYCECPHGRTGLLCHLNDACISNPCNEGSNCDTNPVNGKAICTCPSGYTGPACSQDVDECSLGANPCEHAGKCINTLGSFECQCLQGYTGPRCEIDVNECVSNPCQNDATCLDQIGEFQCICMPGYEGVHCEVNTDECASSPCLHNGRCLDKINEFQCECPTGFTGHLCQYDVDECASTPCKNGAKCLDGPNTYTCVCTEGYTGTHCEVDIDECDPDPCHYGSCKDGVATFTCLCRPGYTGHHCETNINECSSQPCRHGGTCQDRDNAYLCFCLKGTTGPNCEINLDDCASSPCDSGTCLDKIDGYECACEPGYTGSMCNINIDECAGNPCHNGGTCEDGINGFTCRCPEGYHDPTCLSEVNECNSNPCVHGACRDSLNGYKCDCDPGWSGTNCDINNNECESNPCVNGGTCKDMTSGYVCTCREGFSGPNCQTNINECASNPCLNQGTCIDDVAGYKCNCLLPYTGATCEVVLAPCAPSPCRNGGECRQSEDYESFSCVCPTGWQAGQTCEVDINECVLSPCRHGASCQNTHGGYRCHCQAGYSGRNCETDIDDCRPNPCHNGGSCTDGINTAFCDCLPGFRGTFCEEDINECASDPCRNGANCTDCVDSYTCTCPAGFSGIHCENNTPDCTESSCFNGGTCVDGINSFTCLCPPGFTGSYCQHDVNECDSQPCLHGGTCQDGCGSYRCTCPQGYTGPNCQNLVHWCDSSPCKNGGKCWQTHTQYRCECPSGWTGLYCDVPSVSCEVAAQRQGVDVARLCQHGGLCVDAGNTHHCRCQAGYTGSYCEDLVDECSPSPCQNGATCTDYLGGYSCKCVAGYHGVNCSEEIDECLSHPCQNGGTCLDLPNTYKCSCPRGTQGVHCEINVDDCNPPVDPVSRSPKCFNNGTCVDQVGGYSCTCPPGFVGERCEGDVNECLSNPCDARGTQNCVQRVNDFHCECRAGHTGRRCESVINGCKGKPCKNGGTCAVASNTARGFICKCPAGFEGATCENDARTCGSLRCLNGGTCISGPRSPTCLCLGPFTGPECQFPASSPCLGGNPCYNQGTCEPTSESPFYRCLCPAKFNGLLCHILDYSFGGGAGRDIPPPLIEEACELPECQEDAGNKVCSLQCNNHACGWDGGDCSLNFNDPWKNCTQSLQCWKYFSDGHCDSQCNSAGCLFDGFDCQRAEGQCNPLYDQYCKDHFSDGHCDQGCNSAECEWDGLDCAEHVPERLAAGTLVVVVLMPPEQLRNSSFHFLRELSRVLHTNVVFKRDAHGQQMIFPYYGREEELRKHPIKRAAEGWAAPDALLGQVKASLLPGGSEGGRRRRELDPMDVRGSIVYLEIDNRQCVQASSQCFQSATDVAAFLGALASLGSLNIPYKIEAVQSETVEPPPPAQLHFMYVAAAAFVLLFFVGCGVLLSRKRRRQHGQLWFPEGFKVSEASKKKRREPLGEDSVGLKPLKNASDGALMDDNQNEWGDEDLETKKFRFEEPVVLPDLDDQTDHRQWTQQHLDAADLRMSAMAPTPPQGEVDADCMDVNVRGPDGFTPLMIASCSGGGLETGNSEEEEDAPAVISDFIYQGASLHNQTDRTGETALHLAARYSRSDAAKRLLEASADANIQDNMGRTPLHAAVSADAQGVFQILIRNRATDLDARMHDGTTPLILAARLAVEGMLEDLINSHADVNAVDDLGKSALHWAAAVNNVDAAVVLLKNGANKDMQNNREETPLFLAAREGSYETAKVLLDHFANRDITDHMDRLPRDIAQERMHHDIVRLLDEYNLVRSPQLHGAPLGGTPTLSPPLCSPNGYLGSLKPGVQGKKVRKPSSKGLACGSKEAKDLKARRKKSQDGKGCLLDSSGMLSPVDSLESPHGYLSDVASPPLLPSPFQQSPSVPLNHLPGMPDTHLGIGHLNVAAKPEMAALGGGGRLAFETGPPRLSHLPVASGTSTVLGSSSGGALNFTVGGSTSLNGQCEWLSRLQSGMVPNQYNPLRGSVAPGPLSTQAPSLQHGMVGPLHSSLAASALSQMMSYQGLPSTRLATQPHLVQTQQVQPQNLQMQQQNLQPANIQQQQSLQPPPPPPQPHLGVSSAASGHLGRSFLSGEPSQADVQPLGPSSLAVHTILPQESPALPTSLPSSLVPPVTAAQFLTPPSQHSYSSPVDNTPSHQLQVPEHPFLTPSPESPDQWSSSSPHSNVSDWSEGVSSPPTSMQSQIARIPEAFKDYKDDDDK

SEQ ID NO: 3 - protein, 114 aa, Homo Sapien
EVQLVQSGAEVKKPGASVKVSCKASGYNFTGYYMHWVRQAPGQGLEWMGWINPNSGGTNYAQKFQGRVTMTRDTSISTAYMELSRLRSDDTAVYYCATDSFDYWGQGTMVTVSS

SEQ ID NO: 4 - protein, 114 aa, Homo Sapien
EVQLVQSGAEVKKPGASVKVSCKASGYNFTGYYMHWVRQAPGQGLEWMGWINPNSGGTNYAQKFQGRVIMTRDTSISTAYMELSRLTSDDTAVYYCATDSFDYWGRGTMVTVSS

SEQ ID NO: 5 - protein, 114 aa, Homo Sapien
QVQLVQSGPEVKKPGASVKVSCKASGYNFTGYYMHWVRQAPGQGLEWMGWINPNSGGTNYAQKFQGRVTMTRDTSISTAYMELSRLRSDDTAVYYCATDSFDYWGRGTMVTVSS

SEQ ID NO: 6 - protein, 114 aa, Homo Sapien
EVQLVQSGAEVKKPGASVKVSCKASGYNFTGYYMHWVRQAPGQGLEWMGWINPNSGGTNYAQKFQGRVTMTRDTSISTAYMELSRLRSDDTAVYYCATDSFDYWGRGTLVTVSS

SEQ ID NO: 7 - protein, 114 aa, Homo Sapien
QVQLVQSGAEVKKPGASVKVSCKASGYNFTGYYMHWVRQAPGQGLEWMGWINPNSGGTNYAQKFQGRVTMTRDTSISTAYMELSRLRSDDTAVYYCATDSFDYWGRGTMVTVSS

SEQ ID NO: 8 - protein, 133 aa, Homo Sapien
QVQLVQSGAEVKKPGASVRISCKTSGFTFTSYFIHWVRQAPGQRPEWMGVINPSRGNADYAPRFRGRVTMTRDKSTHTVYMDLKSLRSDDAAIYYCARDRLGGLLDYYDSSDSSKNFDAFDFWGQGTLVTVSS

SEQ ID NO: 9 - protein, 114 aa, Homo Sapien
EVQLVQSGAEVKKPGASVKVSCKASGYNFTGYYMHWVRQAPGQGLEWMGWINPNSGGTNYAQKFQGRVTMTRDTSISTAYMELSRLRSDDTAVYYCATDSFDYWGRGTMVTVSS

SEQ ID NO: 10 - protein, 114 aa, Homo Sapien; identical to SEQ ID NO: 6

SEQ ID NO: 11 - protein, 114 aa, Homo Sapien
EVQLVQSGAEVKKPGASVKVSCKASGYNFTGYYMHWVRQAPGQGLEWMGWINPNSGGTNYAQKFQGRVTMTRDTSISTAYMELSRLRSDDTAVYYCATDSFDYWGQGTLVTVSS

SEQ ID NO: 12 - protein, 113 aa, Homo Sapien
EVQLVQSGPEVKKPGTSVKVSCKASGFTFTSSAVQWVRQARGQRLEWIGWIVVGSGNTNYAQKFQERVTITRDMSTSTAYMELSSLRSEDTAVYYCVADTVYWGKGTLVTVSS

SEQ ID NO: 13 - protein, 114 aa, Homo Sapien
EVQLVQSGAEVKKPGASVKVSCKASGYNFTGYYMHWVRQAPGQGLEWMGWINPNSGGTNYAQKFQGRVTMTRDTSISTAYMELSRLRSDDTAVYYCATDSFDYWGQGTTVTVSS

SEQ ID NO: 14 - protein, 114 aa, Homo Sapien
QVQLQQSGAEVKKPGASVKVSCKASGYNFTGYYMHWVRQAPGQGLEWMGWINPNSGGTNYAQKFQGRVTMTRDTSISTAYMELSRLRSDDTAVYYCATDSFDYWGRGTLVTVSS

SEQ ID NO: 15 - protein, 114 aa, Homo Sapien
QVQLVQSGAEVKKPGASVKVSCKASGYNFTGYYMHWVRQAPGQGLEWMGWINPNSGGTNYAQKFQGRVTMTRDTSISTAYMELSRLRSDDTAVYYCATDSFDYWGRGTLVTVSS

SEQ ID NO: 16 - protein, 114 aa, Homo Sapien
QVQLVQSGAEVKKPGASVKVSCKASGYNFTGYYMHWVRQAPGQGLEWMGWINPNSGGTNYAQKFQGRVTMTRDTSISTAYMELSRLRSDDTAVYYCATDSFDYWGQGTLVTVSS

SEQ ID NO: 17 - protein, 114 aa, Homo Sapien; identical to SEQ ID NO: 13

SEQ ID NO: 18 - protein, 114 aa, Homo Sapien; identical to SEQ ID NO: 6

SEQ ID NO: 19 - protein, 114 aa, Homo Sapien; identical to SEQ ID NO: 6

SEQ ID NO: 20 - protein, 120 aa, Homo Sapien
QLQLVETGGGLVKPGESLTLSCAASGFTFSSYSMNWVRQAPGKGLEWVSSISSSGSSIYYADSLKGRFTISRDNAKNSLYLQMNSLRAEDTAVYYCTRGTQWLAGVGDYWGKGTLVTVSS

SEQ ID NO: 21 - protein, 114 aa, Homo Sapien
EVQLVQSGAEVKKPGASVKVSCKASGYNFTGYYMHWVRQAPGQGLEWMGWINPNSGGTNYAQKFQGRVAMTRDTSISTAYMELSRLRSDDSAVYYCATDSFDYWGRGTTVTVSS

SEQ ID NO: 22 - protein, 125 aa, Homo Sapien
EVQLVESGAEVKKPGASLNLSCKASGYSFNKYYIHWVRQAPGQGLELMGRINPGSGTTSYAQKFQGRVTLSRDTSTNTIFMELNGLTGEDTAIYYCARSNYDILAGYGPDAFDIWGRGTLVTVSS

SEQ ID NO: 23 - protein, 110 aa, Homo Sapien
SYVLTQPPSVSEAPRQRVTISCSGSSSNIGNNAVSWYQQLPGKAPKTLIYYDDLLSSGVSDRFSGSRSGTSASLAISGLQSEDEADYYCAAWDDSLNGVVFGGGTKLTVL

SEQ ID NO: 24 - protein, 110 aa, Homo Sapien
QSVLTQPPSASGTPGQRVTISCSGSNSNIGSNYVFWYQQLPGTAPKLLIYNNNQRPSGVPDRFSGSKSGTSASLAISGLRSEDEADYYCAAWDDSLSGVVFGGGTKLTVL

SEQ ID NO: 25 - protein, 110 aa, Homo Sapien
QSVLTQPPSASGTPGQRVTISCSGSSSNIGSNTVNWYQQLPGTAPKLLIYSNNQRPSGVPDRFSGSKSGTSASLAISGLQSEDEADYYCAAWDDSLNGVVFGGGTKLTVL

SEQ ID NO: 26 - protein, 110 aa, Homo Sapien
QPVLTQPPSASGTPGQRVTISCSGSSSNIGSNYVYWYQKFPGTAPKLLIYTNNQRPSGVPDRFSGSKSGTSASLAISGLRSEDEADYYCAAWDDSLSGVVFGGGTKVTVL

SEQ ID NO: 27 - protein, 110 aa, Homo Sapien
LPVLTQPPSASGTPGQRVTISCSGRSSNIGSNFVYWYQQLPGTAPKLLIYRNNQRPSGVPDRFSGSKSGTSASLAISGLRSEDEADYYCATWDDNLSGVVFGGGTKLTVL

SEQ ID NO: 28 - protein, 110 aa, Homo Sapien
QAVLTQPSLASGTPGQRVTISCSGGSSNIGRHTVNWYQQLPGAAPKLLMHSSDQRPSGVPDRFSGSKSGTSASLAISGLQSEDEADYYCAAWDASLKNWVFGGGTKLTVL

SEQ ID NO: 29 - protein, 110 aa, Homo Sapien
QSVLTQPPSASGTPGQRVTISCSGGSSNIGSNTVTWYQQLPGKAPKLLIYISDQRPSGVPDRFSGSKSGTSASLAIRGLQSEDEADYYCAAWDDSLNGAVFGTGTKVTVL

SEQ ID NO: 30 - protein, 110 aa, Homo Sapien
SYVLTQPPSASGTPGQRVTISCSGSSPNIGSNTVNWYQQLPGTAPKLLIYTNNQRPSGVPDRFSGSKSATSASLAISGLQFDDEADYFCAAWDDSLLGVVFGGGTKVTVL

SEQ ID NO: 31 - protein, 110 aa, Homo Sapien
SYVLTQPPSASGAPGQRVTISCSGSISNIGDNTVNWYQHLPRTAPKLVIYSDVQRPSGVPERFSGSKSGTSASLVISGLQAEDEADYYCASWDDSLDGVFFGGGTKLTVL

SEQ ID NO: 32 - protein, 110 aa, Homo Sapien
QAVLTQPSSVSEAPRQRVTISCSGSSSNIGKNAVNWYQQLPGKAPKLLIYYDDLMPSGVSDRFSGSKSGTSASLAISGLQSEDEADYFCAAWDDSLSGWVFGGGTKLTVL

SEQ ID NO: 33 - protein, 111 aa, Homo Sapien
QSVLTQPPSVSGAPGQRITISCTGSSSNIGAGYDVHWYQQLPGTAPKLLIYGNSYRPSGVPDRFSGSKSGTSASLAITGLQAEDEADYYCQSYDSSLTGSIFGGGTKLTVL

SEQ ID NO: 34 - protein, 110 aa, Homo Sapien
QSVLTQPPSASGTPGQRVTISCSGSSSNIGSNTVNWYQQLPGTAPKLLIYSNNQRPSGVPDRFSGSKSGTSASLAISGLQSEDEADYYCAAWDDSLNGLVFGGGTKVTVL

SEQ ID NO: 35 - protein, 110 aa, Homo Sapien
SYELTQPPSASGTPGQRVTISCSGSYSNIGSNYVYWYQQLPGTAPKLLIYTNNQRPSGVPDRFSGSKSGTSASLVISGLRSDDEGDYYCAAWDDSVSVLLFGGGTKVTVL

SEQ ID NO: 36 - protein, 110 aa, Homo Sapien
SYELTQPPSASGTPGQRVTISCSGSNSNIGSNTLNWYQQLPGTAPKLLIYSNNQRPSWVPDRFSGSKSGTSASLAISGLQSEDEADYYCAAWDDSLNGLIFGGGTKLTVL

SEQ ID NO: 37 - protein, 110 aa, Homo Sapien
QPVLTQPPSASWTPGQRVTISCSGSSSNIGSNTVHWYRQFPGTAPQLLIYSNNQRPSGVPDRFSGSKSGTSASLAIRGLQSEDEADYYCAAWDDSLNGVVFGGGIKLTVL

SEQ ID NO: 38 - protein, 111 aa, Homo Sapien
QSVLTQPPSVSGAPGQRVTISCTGSSSNIGAGYDVLWYRQLPGTAPKLLIYGNTHRPSGVPDRFSGSNSGTSASLAITGLQAEDEADYYCQSYDSSLSGSVFGGGTKLTVL

SEQ ID NO: 39 - protein, 110 aa, Homo Sapien
QSVLTQPPSASGTPGQRVTISCSGSSSNIGSNIVNWYQQLPGTAPKLLIYSNNQRPSGVPDRFSGSKSGTSASLAISGLQSEDEADYYCAAWDDSLNGVVFGGGTKLTVL

SEQ ID NO: 40 - protein, 110 aa, Homo Sapien
QSALTQPPSASASPGQSVTISCTGTSSDVGAYDSVSWYQQHPGKAPKLIIYDVNNRPSGVSNRFSGSESGNTASLTISGLQAEDEANYYCSSYRNTKTVVFGGGTKLTVL

SEQ ID NO: 41 - protein, 111 aa, Homo Sapien
QSVLTQPPSVSGAPGQRVTISCTGTSSNIGAGYDVQWYQQLPGTAPKVLMYGNSNRPSGVPDRFSGSKSGTSASLAITGLQAEDEADYYCQSYDSSLSGSLFGTGTKVTVL

SEQ ID NO: 42 - protein, 111 aa, Homo Sapien
QSVVTQPPSVSGAPGQTVTISCTGNSSNIGSSVDVHWYQQLPGTAPKLLIYDNKNRPSGVPDRFSGSKSGTSASLAITGLQAEDEADYYCQSYDSSLSSEVFGGGTKVTVL

SEQ ID NO: 43 - protein, 122 aa, Homo Sapien
EVQLVQSGAEVKKPGSSVKVSCKASGGTLSSYTVSWLRQAPGQGLEWMGRIIPILDRANYAQKFQGRVTITADKSTSTAYMELNSLRSDDTAVYYCARSIGAAGDGVWFDPWGQGTMVTVSS

SEQ ID NO: 44 - protein, 121 aa, Homo Sapien
GVQLVQSGGGLVQPGGSLRLSCAASGFTFDDYAMHWVRQAPGKGLEWVSSISWHSRTIAYADSVKGRFSISRDNAKNSLYLQMNSLRPEDTAVYYCAKASYLSTSSSLDYWGRGTLVTVSS

SEQ ID NO: 45 - protein, 122 aa, Homo Sapien
QVQLQESGPGLVKPSGTLSLTCAVSGVSLATNNWWLWVRQSPGKGLEWIGEIYHSGYTNYNPSLKSRVTISVDKSSNQLSLDLRSITAADTAVYYCARRYCDNGVCYPFDHWGQGTMVTVSS

SEQ ID NO: 46 - protein, 111 aa, Homo Sapien
QAVLTQPSSVSGAPGQRVTISCTGSSSNIGAGYDVHWYQQLPGTAPKLLIFDNKNRPSGVPDRFSGSNSGTSASLAITGLQAEDEAEYYCQSYDNNLSGRVFGGGTKLTVL

SEQ ID NO: 47 - protein, 110 aa, Homo Sapien
QSVLTQPGSVSGSPGQSITISCTGTSSDVGGYNYVSWYQQHPGKAPKLMIYEGSKRPSGVSNRFSGSKSGNTASLTISGLQAEDEADYYCSSYTTRSTRVFGGGTKLTVL

SEQ ID NO: 48 - protein, 110 aa, Homo Sapien
SYVLTQPPSVSEAPRQTVTISCSGNSFNIGRYPVNWYQQLPGKAPKLLIYYNNLRFSGVSDRFSGSKSGTSASLAIRDLLSEDEADYYCSTWDDTLKGWVFGGGTKLTVL

SEQ ID NO: 49 - protein, 133 aa, Homo Sapien
EVQLVQSGAEVKKPGASVRISCKTSGFTFTSYFIHWVRQAPGQRPEWMGVINPSRGNADYAPRFRGRVTMTRDKSTHTVYMDLKSLRSDDAAIYYCARDRLGGLLDYYDSSDSSKNFDAFDFWGQGTLVTVSS

SEQ ID NO: 50 - protein, 128 aa, Homo Sapien
EVQLVQSGAEVKKPGASVKVSCKASGYTFTDYYMHWVRQAPGQGLEWMGWINPNSGGTYFPQNFQGRVTMTSDPSISAAYMELSNLRSDDTAVYFCARGAYDYVWGSHRYSGDAFDFWGQGTLVTVSS

SEQ ID NO: 51 - protein, 114 aa, Homo Sapien; identical to SEQ ID NO: 16

SEQ ID NO: 52 - protein, 133 aa, Homo Sapien; identical to SEQ ID NO: 8

SEQ ID NO: 53 - protein, 120 aa, Homo Sapien
EVQLVQSGGGLVQPGRSLRLSCAASGFTSDDYAMHWVRQAPGKGLDVTAITWNSGHKDYADSVKGRFAVSRDNAKNALYLQMNSLRPEDTAVYYCAKASYLSTSSSLDYWGRGTMVTVSS

SEQ ID NO: 54 - protein, 114 aa, Homo Sapien
EVQLVQSGAEVKKPGASVKVSCKASGYNFTGYYIHWVRQAPGQGLEWMGWINPNSGGTNYAQKFQGRVIMTRDTSISTAYMELSRLRSDDTAVYYCATDSFDYWGRGTLVTVSS

SEQ ID NO: 55 - protein, 117 aa, Homo Sapien
EVQLVESGGDLVQPGGSLRLSCAASGFTFSDSWMHWVRQVPGKGLEWVSHIGIDGITTNYADSVKGRFTISRDNAKNTLYLQMNNLRAEDTAVYYCARNVGWESRPWGQGTLVTVSS

SEQ ID NO: 56 - protein, 116 aa, Homo Sapien
QVQLVQSGAEVKKPGATVKISCKVSGYTFTDYYIHWVQQAPGKGLEWMGLVDPEDGETIYAEKFQGRVTIIADTSTDTAYMELSSLRSEDTAVYYCATGPFRLDSWGQGTMVTVSS

SEQ ID NO: 57 - protein, 114 aa, Homo Sapien
QVQLVQSGAEVKKPGASVKVSCKASGYNFTGYYMHWVRQAPGQGLEWMGWINPNSGGTNYAQKFQGRVTMTRETSISTAYMELSRLRSDDTAVYYCATDSFDYWGRGTLVTISS

SEQ ID NO: 58 - protein, 117 aa, Homo Sapien
QVQLVQSGAEVKKPGASVKVSCKASGYTFTSYGISWVRQAPGQGLEWMGWISAYNGNTNYAQKLQGRVTMTTDTSTSTAYMELRSLRSDDTAVYYCARLASRAFDIWGRGTLVTVSS

SEQ ID NO: 59 - protein, 114 aa, Homo Sapien
QVQLQQSGAEVKKPGASVKVSCKASGYNFTGYYMHWVRQAPGQGLEWMGWINPNSGGTNYAQKFQGRVTMTRDTSISTAYVELSRLRSDDTAVYYCATDSFDYWGRGTLVTVSS

SEQ ID NO: 60 - protein, 125 aa, Homo Sapien
QVQLVQSGAEVKRPGASVNLSCKASGYSFSRYYIHWVRQAPGQGLELMGRINPGGGTTTYAQKFQGRVTLSRDTSTNTIFMELNGLTSEDTAMYYCARSNYDILAGYGPDAFDFWGRGTLVTVSS

SEQ ID NO: 61 - protein, 114 aa, Homo Sapien; identical to SEQ ID NO: 3

SEQ ID NO: 62 - protein, 121 aa, Homo Sapien
EVQLVESGGGLAQPGKSLRISCAASGFTFGDYAMTWVRQAPGKGLEWVSSISGSGSGTYYTDSVKGRFAISRDNSKNTLYPQMNSLAAEDTAIYFCAKDQTDVTIRDFDYWGRGTLVTVSS

SEQ ID NO: 63 - protein, 119 aa, Homo Sapien
QVQLVQSGAEVKKPGASVKVSCKASGYTFTNYGLSWVRQAPGQGLEWMGWISGYNDNTSYAQKFQDRITMTTDTSTSTASMELRSLRSDDTAVYYCAFSYYDSSGYFNWGQGTMVTVSS

SEQ ID NO: 64 - protein, 126 aa, Homo Sapien
QVQLQQSGAEVKKPGSSVKVSCRASGGTFSNYAISWVRQAPGQGLEWMGRIIPIFGGAHYAQKLQGRVSITADESTSTAHMELSSLRSEDAAVYYCASGAYYDVMGNYPYSGMDVWGRGTLVTVSS

SEQ ID NO: 65 - protein, 125 aa, Homo Sapien
EVQLVQSGAEVKKPGASVNLSCKASGYSFSRYYIHWVRQAPGQGLELMGRINPGGGTTTYAQKFQGRVTLSRDTSTNTIFMELNGLTSEDTAMYYCARSNYDILAGYGPDAFDFWGRGTMVTVSS

SEQ ID NO: 66 - protein, 117 aa, Homo Sapien
EVQLVESGAEVKKPGASVKVSCKASGYTFTTYGISWVRQAPGQGLEWMGWISTYNGNTKYAQKLQGRVTMTTDTSTSTAYMELRSLRSDDTAVYYCARDARKAFDIWGRGTLVTVSS

SEQ ID NO: 67 - protein, 117 aa, Homo Sapien
QVQLVQSGGGLVQPGGSLRLSCGASGFTFSSHWMSWVRRPPGRGLEWVANINEGGSAEYYADSLKGRFTISRDNAKNSLFLQMDSLRAEDTAVYYCVRDQFHSNYDWGQGTMVTVSS

SEQ ID NO: 68 - protein, 114 aa, Homo Sapien
QVQLVQSGAGLKRPGTSVKISCKTSGYIFSQYPMHWVRQAPGQGLEWVAWVDTGNGTTRYSPNFQGRATVSGDTSANTGYLELRSLRFTDTAVYYCATNAFDYWGRGTLVTVSS

SEQ ID NO: 69 - protein, 114 aa, Homo Sapien; identical to SEQ ID NO: 6

SEQ ID NO: 70 - protein, 114 aa, Homo Sapien
QVQLQESGAEVKKPGASVKVSCKASGYNFTGYYMHWVRQAPGQGLEWMGWINPNSGGTNYAQKFQGRVTMTRDTSISTAYMELSRLRSDDTAVYYCATDSFDYWGRGTMVTVSS

SEQ ID NO: 71 - protein, 114 aa, Homo Sapien; identical to SEQ ID NO: 15

SEQ ID NO: 72 - protein, 114 aa, Homo Sapien; identical to SEQ ID NO: 3

SEQ ID NO: 73 - protein, 114 aa, Homo Sapien
QVQLVQSGAEVKKPGASVKVSCKASGYNFTGYYMHWVRQAPGQGLEWMGWINPNSGGTNYAQKFQGRVTMTRDTSISTAYMELSRLRSDDTAVYYCATDSFDYWGQGTMVTVSS

SEQ ID NO: 74 - protein, 114 aa, Homo Sapien; identical to SEQ ID NO: 6

SEQ ID NO: 75 - protein, 114 aa, Homo Sapien
QVQLVQSGAEVKKPGASVKVSCKASGYNFTGYYMHWVRQAPGQGLEWMGWINPNSGGTNYAQKFQGRVTMTRDTSISTAYMELSRLRSDDTAVYYCATDSFDYWGRGTTVTVSS

SEQ ID NO: 76 - protein, 114 aa, Homo Sapien; identical to SEQ ID NO: 73

SEQ ID NO: 77 - protein, 111 aa, Homo Sapien
NFMLTQPHSVSESPGKTVIISCTRSSGSIASNYVQWLQQRPGSSPTTVIYDDNRRPSGVPDRFSGSIDGSSNSASLTISGLKTEDEADYYCQSYDRFDHVVFGGGTKLTVL

SEQ ID NO: 78 - protein, 110 aa, Homo Sapien
QSVLTQPPSASGTPGQRVTISCSGSSSNIGSNTVNWYQRLPGAAPQLLIYNNDQRPSGIPDRFSGSKSGTSGSLVISGLQSEDEADYYCASWDDSLNGRVFGGGTKLTVL

SEQ ID NO: 79 - protein, 110 aa, Homo Sapien
SYELTQPPSASGTPGQRVTISCSGSSSNIGSNTVNWYQQLPGTAPKLLIYSNNQRPSGVPDRFSGSKSGTSASLAISGLQSEDEADYYCAAWDDSLNGYVFGTGTKLTVL

SEQ ID NO: 80 - protein, 107 aa, Homo Sapien
DIQMTQSPSSLSAFVGDRVTITCRASQGINNYLAWFQQKPGKAPKSLIYAASTLRSGVPPRFSGSGSGTDFTLTISSLQPEDFATYYCQQYDSYPHTFGQGTRLEIK

SEQ ID NO: 81 - protein, 108 aa, Homo Sapien
SYVLTQPPSVSVAPGQTARITCGGNNIGSKSVHWYQQKPGQAPVLVIYEDSKRPSGIPERFSGSSSGTMATLTISGAQVEDEADYYCYSTDSSGNHRVFGTGTKVTVL

SEQ ID NO: 82 - protein, 110 aa, Homo Sapien
QSVLTQPPSASGTPGQRVTISCSGSYSNIGSNYVYWYQQFPGTAPKLLIYTNNQRPSGVPDRFSGSKSGSSASLAISGLRSEDEADYYCAAWDDSVGVLLFGGGTKLTVL

SEQ ID NO: 83 - protein, 111 aa, Homo Sapien
SYVLTQPPSASGAPGQRVTISCSGSDSNIGRNTVNWYQQQLPGTAPTLLIYTNNQRPSGVPDRFSGSKSGTSASLAISGLQSGDEADYYCAAWDDSLNAYFFGPGTKLTVL

SEQ ID NO: 84 - protein, 112 aa, Homo Sapien
QSVLTQPPSVSGAPGQRVTISCTGSSSNIGAGYDVHWYQQLPGSAPKLLIYGNNNRPSGVPDRFSGSKSGTSASLAITGLQAEDEADYYCQSFDNRLSDFNVFGTGTKVTVL

SEQ ID NO: 85 - protein, 110 aa, Homo Sapien
QSVLTQPPSASGTPGQRVTISCSGSSSNIGSNYVYWYQQLPGTAPKLLIYRNNQRPSGVPDRFSGSKSGTSASLAISGLRSEDEADYYCAAWDDSLSGLVFGGGTKLTVL

SEQ ID NO: 86 - protein, 110 aa, Homo Sapien
QSVLTQPASVSGSPGQSITISCTGTSSDVGGYNYVSWYQQHPGKAPKLMIYEGSKRPSGVSNRFSGSKSGNTASLTISGLQAEDEADYYCSSYTTRSTRVFGGGTKLTVL

SEQ ID NO: 87 - protein, 111 aa, Homo Sapien
QSVLTQPPSASGTPGQRVTISCSGSSSNIGSNPVNWYQQLPGTAPKLLIYSNNQRPSGVPDRFSGSKSGTSASLAISGLHSEDEADYYCAAWDDSLNGSSVFGTGTKLTVL

SEQ ID NO: 88 - protein, 111 aa, Homo Sapien
QAVLTQPSSVSGAPGQRVTISCTGSSSNIGADNDVHWYQKFPGTAPKLLIFSNNNRPSGVPDRFSGSKSGTSASLAITGLQADDEADYYCQSYDSGLTRELFGGGTKLTVL

SEQ ID NO: 89 - protein, 110 aa, Homo Sapien
QSVVTQPPSASGSPGQRVTIACSGSSSNIGSNTVNWYQHVPGTAPKLLIYNNNQRPSGVQDRFSGSKSDTSASLAISGLQAEDEAVYYCATWDDSLIGLAFGGGTKLTVL

SEQ ID NO: 90 - protein, 108 aa, Homo Sapien
SYELTQPPSVSVAPGQTARISCGGDNLGRKSVHWYQQKPGQAPVLVIYEDSKRPSGIPERFSGSSSGTMATLTISGAQVEDEADYYCYSTDSSGNHRVFGGGTKVTVL

SEQ ID NO: 91 - protein, 111 aa, Homo Sapien
QAVLTQPSSVSGAPGQRVTVSCTGSSSNIGTGYAVHWYQQLPGTAPRLLIFGNNNRPSGVPDRFSGSKSGTSASLVITGLQAEDEADYYCQSFDTLSGSRVFGGGTKVTVL

SEQ ID NO: 92 - protein, 108 aa, Homo Sapien
SYVLTQPPSVSVSPGQTAKITCGGDKIETKSVHWYQQKPGQAPVLVIYEDTKRPSGISERLSGSSAGTVATLTITGAQVDDEADYFCYSTDATGTERVFGGGTKLTVL

SEQ ID NO: 93 - protein, 110 aa, Homo Sapien
QSVLTQPPSVSGAPGQRVTISCIGSNSNIGAGHDVHWYQQFPGTAPKLLIYDNTNRPSGVPDRFSGSKSGTSVSLAITGLQAEDEADYYCQSYDSSLGEVFGGGTKLTVL

SEQ ID NO: 94 - protein, 110 aa, Homo Sapien
HVILTQPRSVSGSPGQSITISCTGTSSDVGGYNYVSWYQQHPGKAPKLMIYEGSKRPSGVSNRFSGSKSGNTASLTISGLQAEDEADYYCSSYTTRSTRVFGGGTKLTVL

SEQ ID NO: 95 - protein, 111 aa, Homo Sapien
QAVLTQPSSVSGAPGQRVTISCTGSSSNIGAPFDVHWYQQLPGTAPKLLIYGNSNRPSGVPDRFSGSKFGTSASLAITGLQAADEADYYCQSYDSSLSGWVFGGGTKLTVL

SEQ ID NO: 96 - protein, 108 aa, Homo Sapien
SYELTQPPSVSVSPGQTARITCSGDALPDKYVHWYQQKSGQAPVLVLFDDSKRPSGIPERFSGSSSGTVATLIISGAQVEDEGDFFCYSTDSSGNERVFGGGTKLTVL

SEQ ID NO: 97 - protein, 110 aa, Homo Sapien
QSVLTQPPSASGTPGQRVTISCSGSSSNIGSNSVYWYQQLPGTAPKLLIYRNNQRPSGVPDRFSGSKSGTSASLAISGLRSEDEADYYCAAWDDSLSGLVFGGGTKLTVL

SEQ ID NO: 98 - protein, 110 aa, Homo Sapien
SYVLTQPPSASGTPGQRVTISCSGSSSNIGSNTVHWYQQLPETAPKLLIYTNNQRPSGVPDRFSGSKSGTSASLAISGLQSEDEADYYCASWDDSLKAYVFGTRTKLTVL

SEQ ID NO: 99 - protein, 110 aa, Homo Sapien
QSVLTQPPSASGTPGQRVTISCSGSRSSIGSNTVSWYQQLPGTAPKLIIYTNNQRPSGVPDRFSGSKSGTSATLAISGLQSEDEADYYCASWDDSLNDYVFGVGTKVTVL

SEQ ID NO: 100 - protein, 110 aa, Homo Sapien
SYVLTQPPSASGTPGQRVTISCSGSSSNIGSNTVNWYQQLPGTAPKLLIYNDNERPSGVPDRFSGSKSGTYASLAISGLQSEDEADYYCAAWDDSLNGLAFGGGTKLTVL

SEQ ID NO: 101 - protein, 110 aa, Homo Sapien
LPVLTQPPSASGTPGQRVTISCSGSSSNIGSNIVNWYQQLPGTAPKLLIYTSNQRPSGVPDRFSGSKSGTSASLAISGLQSEDEADYYCAAWDDSLNAVVFGGGTKVTVL

SEQ ID NO: 102 - protein, 110 aa, Homo Sapien
SYELTQPPSVSGTPGQRVTISCSGSSSNIESNAVHWYQHLPGRAPKLLIFSHNQRPSGVPARFSGSKSGTSASLAISGLQSEDEADYYCAAWDDSLSGYVFASGTKLTVL

SEQ ID NO: 103 - protein, 110 aa, Homo Sapien
SYVLTQPPSVSGTPGQRVTISCSGSSSNIESNAVHWYQHLPGRAPKLLIFSHNQRPSGVPARFSGSKSGTSASLAISGLQSEDEADYYCAAWDDSLSGYVFASGTKVTVL

SEQ ID NO: 104 - protein, 110 aa, Homo Sapien
QSVLTQPPSASGTPGQRVTISCSGGRSNIGTNYVYWYQKLPGTAPKSLIYTTNQRPSGVPDRFSGSKAGTSASLAISGLRSEDEGDYYCASWDESLNGVVFGGGTKVTVL

SEQ ID NO: 105 - DNA, 342 bp, Homo Sapien
gaagtgcagctggtgcagtctggggctgaggtgaagaagcctggggcctcagtgaaggtctcttgcaaggcttctggatacaacttcaccggctactatatgcactgggtgcgacaggcccctggacaagggcttgagtggatgggatggatcaaccctaacagtggtggcacaaactatgcacagaagtttcagggcagggtcaccatgaccagggacacgtccatcagcacagcctacatggagttgagcaggctgagatctgacgacacggccgtgtattactgtgcgacagactcctttgactactggggccaggggacaatggtcaccgtctcgagt

SEQ ID NO: 106 - DNA, 342 bp, Homo Sapien
gaggtgcagctggtgcagtctggggctgaggtgaagaagcctggggcctcagtgaaggtctcctgcaaggcttctggatacaacttcaccggctactatatgcactgggtgcgacaggcccctggacaagggcttgagtggatgggatggatcaaccctaacagtggtggcacaaactatgcacagaagtttcagggcagggtcatcatgaccagggacacgtccatcagcacagcctacatggaactgagcaggctgacatctgacgacacggccgtgtattactgtgcgacagactcctttgactactggggcagagggacaatggtcaccgtctcgagt

SEQ ID NO: 107 - DNA, 342 bp, Homo Sapien
caggtgcagctggtgcagtctgggcctgaggtgaagaagcctggggcctcagtgaaggtctcttgcaaggcttctggatacaacttcaccggctactatatgcactgggtgcgacaggcccctggacaagggcttgagtggatgggatggatcaaccctaacagtggtggcacaaactatgcacagaagtttcagggcagggtcaccatgaccagggacacgtccatcagcacagcctacatggagctgagcaggctgagatctgacgacacggccgtgtattactgtgcgacagactcctttgactactggggccgggggacaatggtcaccgtctcgagt

SEQ ID NO: 108 - DNA, 342 bp, Homo Sapien
caggtgcagctggtgcagtctggggctgaggtgaagaagcctggggcctcagtgaaggtctcttgcaaggcttctggatacaacttcaccggctactatatgcactgggtgcgacaggcccctggacaagggcttgagtggatgggatggatcaaccctaacagtggtggcacaaactatgcacagaagtttcagggcagggtcaccatgaccagggacacgtccatcagcacagcctacatggagctgagcaggctgagatctgacgacacggccgtgtattactgtgcgacagactcctttgactactggggccgggggacaatggtcaccgtctcgagt

SEQ ID NO: 109 - DNA, 399 bp, Homo Sapien
caggtccagctggtacagtctggagctgaggtgaagaagcctggggcctcagtgaggatttcctgcaagacatctggattcacctttaccagctactttatccactgggtgcggcaggccccaggacaaaggccagagtggatgggcgttatcaacccaagccgtggcaacgcagactacgcaccgaggttccgtggcagagtcaccatgacccgggacaagtccacgcacactgtttacatggatctgaagagcctcagatctgacgacgcggccatatattactgtgccagagatcggcttggtggccttcttgattactacgacagtagtgattcttcgaagaattttgatgcttttgatttctggggccaaggcaccctggtcaccgtctcgagt

SEQ ID NO: 110 - DNA, 342 bp, Homo Sapien
gaggtgcagctggtgcagtctggggctgaggtgaagaagcctggggcctcagtgaaggtctcctgcaaggcttctggatacaacttcaccggctactatatgcactgggtgcgacaggcccctggacaagggcttgagtggatgggatggatcaaccctaacagtggtggcacaaactatgcacagaagtttcagggcagggtcaccatgaccagggacacgtccatcagcacagcctacatggagctgagcaggctgagatctgacgacacggccgtgtattactgtgcgacagactcctttgactactggggccgggggacaatggtcaccgtctcgagt

SEQ ID NO: 111 - DNA, 342 bp, Homo Sapien
gaggtgcagctggtgcagtctggggctgaggtgaagaagcctggggcctcagtgaaggtctcttgcaaggcttctggatacaacttcaccggctactatatgcactgggtgcgacaggcccctggacaagggcttgagtggatgggatggatcaaccctaacagtggtggcacaaactatgcacagaagtttcagggcagggtcaccatgaccagggacacgtccatcagcacagcctacatggagctgagcaggctgagatctgacgacacggccgtgtattactgtgcgacagactcctttgactactggggccggggcaccctggtcaccgtctcgagt

SEQ ID NO: 112 - DNA, 342 bp, Homo Sapien
gaggtgcagctggtgcagtctggggctgaggtgaagaagcctggggcctcagtgaaggtctcttgcaaggcttctggatacaacttcaccggctactatatgcactgggtgcgacaggcccctggacaagggcttgagtggatgggatggatcaaccctaacagtggtggcacaaactatgcacagaagtttcagggcagggtcaccatgaccagggacacgtccatcagcacagcctacatggagctgagcaggctgagatctgacgacacggccgtgtattactgtgcgacagactcctttgactactggggccagggcaccctggtcaccgtctcgagt

SEQ ID NO: 113 - DNA, 339 bp, Homo Sapien
gaggtgcagctggtgcagtctgggcctgaggtgaagaagcctgggacctcagtgaaggtctcctgcaaggcttctggattcacctttactagctctgctgtgcagtgggtgcgacaggctcgtggacaacgccttgagtggataggatggatcgtcgttggcagtggtaacacaaactacgcacagaagttccaggaaagagtcaccattaccagggacatgtccacaagcacagcctacatggagctgagcagcctgagatccgaggacacggccgtgtattattgtgtggcagatacggtctactggggcaagggaaccctggtcaccgtctcgagt

SEQ ID NO: 114 - DNA, 342 bp, Homo Sapien
gaagtgcagctggtgcagtctggggctgaggtgaagaagcctggggcctcagtgaaggtctcctgcaaggcttctggatacaacttcaccggctactatatgcactgggtgcgacaggcccctggacaaggacttgagtggatgggatggatcaaccctaacagtggtggcacaaactatgcacagaagtttcagggcagggtcaccatgaccagggacacgtccatcagcacagcctacatggagctgagcaggctgagatctgacgacacggccgtgtattactgtgcgacagactcctttgactactgggggcaagggaccacggtcaccgtctcgagt

SEQ ID NO: 115 - DNA, 342 bp, Homo Sapien
caggtacagctgcagcagtcaggggctgaggtgaagaagcctggggcctcagtgaaggtctcctgcaaggcttctggatacaacttcaccggctactatatgcactgggtgcgacaggcccctggacaaggacttgagtggatgggatggatcaaccctaacagtggtggcacaaactatgcacagaagtttcagggcagggtcaccatgaccagggacacgtccatcagcacagcctacatggagctgagcaggctgagatctgacgacacggccgtgtattactgtgcgacagactcctttgactactggggccggggaaccctggtcaccgtctcgagt

SEQ ID NO: 116 - DNA, 342 bp, Homo Sapien
gaggtgcagctggtgcagtctggggctgaggtgaagaagcctggggcctcagtgaaggtctcctgcaaggcttctggatacaacttcaccggctactatatgcactgggtgcgacaggcccctggacaagggcttgagtggatgggatggatcaaccctaacagtggtggcacaaactatgcacagaagtttcagggcagggtcaccatgaccagggacacgtccatcagcacagcctacatggagctgagcaggctgagatctgacgacacggccgtgtattactgtgcgacagactcctttgactactggggccgaggaaccctggtcaccgtctcgagt

SEQ ID NO: 117 - DNA, 342 bp, Homo Sapien
caggtccagctggtgcagtctggggctgaggtgaagaagcctggggcctcagtgaaggtctcttgcaaggcttctggatacaacttcaccggctactatatgcactgggtgcgacaggcccctggacaagggcttgagtggatgggatggatcaaccctaacagtggtggcacaaactatgcacagaagtttcagggcagggtcaccatgaccagggacacgtccatcagcacagcctacatggagctgagcaggctgagatctgacgacacggccgtgtattactgtgcgacagactcctttgactactggggccggggcaccctggtcaccgtctcgagt

SEQ ID NO: 118 - DNA, 342 bp, Homo Sapien
caggtgcagctggtgcaatctggggctgaggtgaagaagcctggggcctcagtgaaggtctcttgcaaggcttctggatacaacttcaccggctactatatgcactgggtgcgacaggcccctggacaagggcttgagtggatgggatggatcaaccctaacagtggtggcacaaactatgcacagaagtttcagggcagggtcaccatgaccagggacacgtccatcagcacagcctacatggagctgagcaggctgagatctgacgacacggccgtgtattactgtgcgacagactcctttgactactggggccagggcaccctggtcaccgtctcgagt

SEQ ID NO: 119 - DNA, 342 bp, Homo Sapien
gaggtgcagctggtgcagtctggggctgaggtgaagaagcctggggcctcagtgaaggtctcctgcaaggcttctggatacaacttcaccggctactatatgcactgggtgcgacaggcccctggacaagggcttgagtggatgggatggatcaaccctaacagtggtggcacaaactatgcacagaagtttcagggcagggtcaccatgaccagggacacgtccatcagcacagcctacatggagctgagcaggctgagatctgacgacacggccgtgtattactgtgcgacagactcctttgactactgggggcaggggaccacggtcaccgtctcgagt

SEQ ID NO: 120 - DNA, 342 bp, Homo Sapien
gaggtgcagctggtgcagtctggggctgaggtgaagaagcctggggcctcagtgaaggtctcttgcaaggcttctggatacaacttcaccggctactatatgcactgggtgcgacaggcccctggacaagggcttgagtggatgggatggatcaaccctaacagtggtggcacaaactatgcacagaagtttcagggcagggtcaccatgaccagggacacgtccatcagcacagcctacatggagctgagcaggctgagatctgacgacacggccgtgtattactgtgcgacagactcctttgactactggggccggggaaccctggtcaccgtctcgagt

SEQ ID NO: 121 - DNA, 342 bp, Homo Sapien
gaggtccagctggtgcagtctggggctgaggtgaagaagcctggggcctcagtgaaggtctcttgcaaggcttctggatacaacttcaccggctactatatgcactgggtgcgacaggcccctggacaagggcttgagtggatgggatggatcaaccctaacagtggtggcacaaactatgcacagaagtttcagggcagggtcaccatgaccagggacacgtccatcagcacagcctacatggagctgagcaggctgagatctgacgacacggccgtgtattactgtgcgacagactcctttgactactggggccggggcaccctggtcaccgtctcgagt

SEQ ID NO: 122 - DNA, 360 bp, Homo Sapien
cagctgcagctggtggagaccgggggaggcctggtcaagcctggggagtccctgactctctcctgtgcagcctctggattcaccttcagtagttattccatgaactgggtccgccaggctccagggaaggggctggagtgggtctcatccattagtagtagtggtagttccatatactacgcagactcattgaagggccgattcaccatctccagagacaacgccaagaactcactgtatctgcaaatgaacagcctgagagccgaggacacggctgtctattactgtacgagagggacgcagtggctggctggggtaggagactattggggcaagggaaccctggtcaccgtctcgagt

SEQ ID NO: 123 - DNA, 342 bp, Homo Sapien
gaggtccagctggtgcagtctggggctgaggtgaagaagcctggggcctcagtgaaggtctcctgcaaggcttctggatacaacttcaccggctactatatgcactgggtgcgacaggcccctggacaagggcttgagtggatgggatggatcaaccctaacagtggtggcacaaactatgcacagaagtttcagggcagggtcgccatgaccagggacacgtccatcagcacagcctacatggagctgagcaggctgagatctgacgactcggccgtgtattactgtgcgacagactcctttgactactgggggcgagggaccacggtcaccgtctcgagt

SEQ ID NO: 124 - DNA, 375 bp, Homo Sapien
gaggtgcagctggtggagtctggggctgaggtgaagaagcctggggcctcacttaacctttcctgcaaggcatctggatactccttcaacaaatactacatccactgggtgcgacaggcccctggacaaggacttgagttgatgggacggatcaaccctggaagtggtaccacaagctacgcacagaaattccagggcagagtcaccctgtccagggacacgtcgacgaacaccatcttcatggaactgaacggcctcacaggtgaagacacggccatatattattgtgcgaggtcgaactacgatatattggctggttatgggcctgacgcttttgatatctggggccgaggcaccctggtcaccgtctcgagt

SEQ ID NO: 125 - DNA, 330 bp, Homo Sapien
tcctatgtgctgactcagccaccctcggtgtctgaagcccccaggcagagggtcaccatctcctgttctggaagcagctccaacatcggaaataatgctgtaagctggtaccagcagctcccaggaaaggctcccaaaaccctcatctattatgatgatctgctgtcctcaggggtctctgaccgattctctggctccaggtctggcacctcagcctccctggccatcagtgggctccagtccgaggatgaggctgattattactgtgcagcatgggatgacagcctgaatggtgtggtattcggcggagggaccaagctgaccgtccta

SEQ ID NO: 126 - DNA, 330 bp, Homo Sapien
cagtctgtgctgacgcagccgccctcagcgtctgggacccccgggcagagggtcaccatctcttgttctggaagcaactccaacatcggcagtaattatgtattctggtaccagcagctcccgggaacggcccccaaactcctcatctataacaataatcagcggccctcaggggtccctgaccgattctctggctccaagtctggcacctcagcctccctggccatcagtgggctccggtccgaggatgaggctgattattactgtgcagcatgggatgacagcctgagtggtgtggtattcggcggagggaccaagctgaccgtccta

SEQ ID NO: 127 - DNA, 330 bp, Homo Sapien
cagtctgtgctgactcagccaccctcagcgtctgggacccccgggcagagggtcaccatctcttgttctggaagcagctccaacatcggaagtaatactgtaaactggtaccagcagctcccaggaacggcccccaaactcctcatctatagtaataatcagcggccctcaggggtccctgaccgattctctggctccaagtctggcacctcagcctccctggccatcagtgggctccagtctgaggatgaggctgattattactgtgcagcatgggatgacagcctgaatggtgtggtattcggcggagggaccaagctgaccgtccta

SEQ ID NO: 128 - DNA, 330 bp, Homo Sapien
ctgcctgtgctgactcagccaccctcagcgtctgggacccccgggcagagggtcaccatctcttgttctggaaggagctccaacatcggaagtaattttgtatattggtaccagcagctcccaggaacggcccccaaactcctcatctacaggaataatcagcggccctcaggggtccctgaccgattctccggctccaagtctggcacctcagcctccctggccatcagtgggctccggtccgaggatgaggctgattattattgtgcaacatgggatgacaacctgagtggtgtggtattcggcggagggaccaagctgaccgtccta

SEQ ID NO: 129 - DNA, 330 bp, Homo Sapien
caggctgtgctgactcagccgtccttagcgtctgggacccccgggcagagggtcaccatctcttgttctggaggcagttccaacatcggaagacatactgtgaactggtaccagcaactcccaggagcggcccccaaactcctcatgcatagtagtgatcagcggccctcaggggtccctgaccgattctctggctccaagtctgggacctcagcctccctggccatcagtgggctccagtctgaggatgaggctgattattactgtgcagcatgggatgccagtctcaagaattgggtgttcggcggagggaccaagctgaccgtccta

SEQ ID NO: 130 - DNA, 330 bp, Homo Sapien
cagtctgtgctgacgcagccgccctcagcgtctgggacccccgggcagagggtcaccatctcttgttctggaggcagttccaacatcggaagtaatactgtaacctggtaccaacaactcccaggaaaggcccccaaactcctcatttatatcagtgatcagcggccctctggggtccctgaccgattctctggctccaagtctggcacctcagcctccctggccatcagagggctccagtctgaggatgaggctgattattactgtgcagcatgggatgacagcctcaatggtgccgtcttcggaactgggaccaaggtcaccgtccta

SEQ ID NO: 131 - DNA, 330 bp, Homo Sapien
tcctatgtgctgactcagccaccctcagcgtctgggacccccgggcagagggtcaccatctcttgttctgggagcagtcccaacatcggaagtaatactgtcaactggtaccagcaactcccaggaacggcccccaaacttctcatctatactaataatcagcggccctcaggggtccctgaccgattctctggctccaagtctgctacctcagcctccctggccatcagtgggctccagtttgacgatgaggctgattatttctgtgcagcgtgggacgacagccttcttggtgtggtcttcggcggagggaccaaggtcaccgtccta

SEQ ID NO: 132 - DNA, 330 bp, Homo Sapien
tcctatgtgctgactcagccaccctcagcgtctggggcccccggtcagagggtcaccatctcttgttctggtagcatctccaacatcggagataatactgtaaactggtaccaacacctcccaagaacggcccccaaactcgtcatctatagtgatgttcagcggccctccggggtccctgagcgattctctggctccaagtctggcacctcagcctccctggtcatcagtggactccaggctgaagatgaggctgattattactgtgcatcatgggacgacagcctggatggtgtgtttttcggcggagggaccaagctgaccgtccta

SEQ ID NO: 133 - DNA, 330 bp, Homo Sapien
caggctgtgctgactcagccgtcctcggtgtctgaggcccccaggcagagggtcaccatctcctgttctggaagcagctccaacatcggaaagaatgctgtaaactggtaccagcagctcccagggaaggctcccaaactcctcatctattatgatgatctgatgccctcaggggtctctgaccgattctctggctccaagtctggcacctcagcctccctggccatcagtgggctccagtctgaggatgaggctgactatttctgtgcagcatgggatgacagcctgagtggttgggtgttcggcggagggaccaagctgaccgtccta

SEQ ID NO: 134 - DNA, 333 bp, Homo Sapien
cagtctgtgttgacgcagccgccctcagtgtctggggccccagggcagaggatcaccatctcctgcactgggagcagctccaacatcggggcaggttatgatgtacactggtaccagcagcttccaggaacagcccccaaactcctcatctatggtaacagctatcggccctcaggggtccctgaccgattctctggctccaagtctggcacctcagcctccctggccatcactgggctccaggctgaggatgaggctgattattactgccagtcctatgacagcagcctgactggttcgatattcggcggagggaccaagctgaccgtccta

SEQ ID NO: 135 - DNA, 330 bp, Homo Sapien
cagtctgtgctgactcagccaccctcagcgtctgggacccccgggcagagggtcaccatctcttgttctggaagcagctccaacatcggaagtaatactgtaaactggtaccagcagctcccaggaacggcccccaaactcctcatctatagtaataatcagcggccctcaggggtccctgaccgattctctggctccaagtctggcacctcagcctccctggccatcagtgggctccagtctgaggatgaggctgattattactgtgcagcatgggatgacagcctgaatgggttggtattcggcggagggaccaaggtcaccgtccta

SEQ ID NO: 136 - DNA, 330 bp, Homo Sapien
cagcctgtgctgactcagccaccctcagcgtctgggacccccgggcagagggtcaccatctcttgttctggaagcagctccaacatcggaagtaattatgtatattggtaccagaagttcccaggaacggcccccaaactcctcatctatacgaataatcagcggccctcaggggtccctgaccgattttctggctccaagtctggcacctcagcctccctggccatcagtgggctccggtccgaggatgaggctgattattactgtgcagcatgggatgacagcctgagtggtgtggtattcggcggagggaccaaggtcaccgtccta

SEQ ID NO: 137 - DNA, 330 bp, Homo Sapien
tcctatgagctgactcagccaccctcagcgtctgggacccccgggcagagggtcaccatctcttgttctggaagctactccaacatcggaagtaattatgtatactggtaccagcagctcccaggaacggcccccaaactcctcatctatacgaataatcagcggccctcaggggtccctgaccgattctctggctccaagtctggcacctcagcctcccttgtcatcagtgggctccggtccgacgatgaaggtgattattactgtgcagcatgggatgacagtgtgagtgtcctgttattcggcggggggaccaaggtcaccgtccta

SEQ ID NO: 138 - DNA, 330 bp, Homo Sapien
tcctatgagctgactcagccaccctcagcgtctgggacccccgggcagagggtcaccatctcttgttctggaagcaactccaacatcggaagtaatactctaaactggtaccaacaactcccaggaacggcccccaaactcctcatctatagtaataatcagcggccctcatgggtccctgaccgattctctggctccaagtctggcacctcagcctccctggccatcagtggtctccagtctgaggatgaggctgattattactgtgcagcatgggatgacagcctgaatggcctgatattcggcggagggaccaagctgaccgtccta

SEQ ID NO: 139 - DNA, 330 bp, Homo Sapien
cagcctgtgctgactcagcccccctcagcgtcttggacccccgggcagagggtcaccatctcttgttctggaagcagttccaacatcggaagtaatacagtgcactggtaccggcagttcccaggaacggccccccaactcctcatctatagtaataaccagcggccctcaggggtccctgaccgattctctggctccaagtctggcacctcagcctccctggccatcagagggctccagtctgaggatgaggctgattattattgtgcagcatgggatgacagcctgaatggtgtggttttcggcggagggatcaagctgaccgtccta

SEQ ID NO: 140 - DNA, 333 bp, Homo Sapien
cagtctgtgttgacgcagccgccctcagtgtctggggccccagggcagagggtcaccatctcctgcactgggagcagctccaacatcggggcaggttatgatgtactctggtaccggcagcttccaggaacagcccccaaactcctcatctatggtaacacccatcggccctcaggggtccctgaccgattctctggctccaactctggcacctcagcctccctggccatcactgggctccaggctgaggatgaggctgattattactgccagtcctatgacagcagcctgagtggttcggtgttcggcggagggaccaagctgaccgtccta

SEQ ID NO: 141 - DNA, 330 bp, Homo Sapien
cagtctgtgttgacgcagccgccctcagcgtctgggacccccgggcagagggtcaccatctcttgttctggaagcagctccaacatcggaagtaatattgtaaactggtaccagcagctcccaggaacggcccccaaactcctcatctatagtaataatcagcggccctcaggggtccctgaccgattctctggctccaagtctggcacctcagcctccctggccatcagtgggctccagtctgaggatgaggctgattattactgtgcagcatgggatgacagcctgaatggtgtggtattcggcggagggaccaagctgaccgtccta

SEQ ID NO: 142 - DNA, 330 bp, Homo Sapien
caatctgccctgactcagcctccctccgcgtccgcgtctcctggccagtcagtcaccatctcctgcactggaaccagcagtgacgttggtgcttatgactctgtctcctggtaccaacagcaccccggcaaagcccccaaactcataatttatgacgtcaataaccggccctcaggggtttcgaatcgcttctctggctccgagtctggcaacacggcctccctgaccatctctgggctccaggctgaggacgaggctaattattactgcagctcatatagaaacaccaagactgtggtattcggcggggggaccaagctgaccgtccta

SEQ ID NO: 143 - DNA, 333 bp, Homo Sapien
cagtctgtgctgactcagccaccctcggtgtctggggccccaggccagagggtcaccatctcctgcactgggaccagctccaacatcggggcaggttatgatgtacagtggtaccagcagcttccaggaacagcccccaaagtcctcatgtatggtaacagcaatcggccctcaggggtccctgaccgattctcaggctccaagtctggcacctcagcctccctggccatcactgggctccaggctgaggatgaggctgattattattgccagtcctatgacagcagcctgagtggttccctcttcggaaccgggaccaaggtcaccgtccta

SEQ ID NO: 144 - DNA, 333 bp, Homo Sapien
cagtctgtcgtgacgcagccgccctcggtgtctggggctccggggcagacagtcaccatctcctgcactgggaatagctccaacatcgggtcaagtgttgatgtacactggtaccagcagcttccagggacagcccccaaactcctcatctatgataacaaaaatcggccctcgggggtccctgaccgattctctggctccaagtctggcacctcagcctccctggccatcactgggctccaggctgaggatgaggctgattattactgccagtcctatgacagcagcctgagttctgaggtgttcggcggagggaccaaggtcaccgtccta

SEQ ID NO: 145 - DNA, 366 bp, Homo Sapien
gaggtccagctggtacagtctggggctgaggtgaagaagcctgggtcctcggtgaaggtctcctgcaaggcttctggaggcaccctcagcagctacactgtcagctggttgcgacaggcccctggacaaggtcttgagtggatgggacggattatccctatccttgatagagcaaactatgcacagaagttccagggcagagtcacgattaccgcggacaaatccacgagcacagcctacatggagctcaacagcctgagatcggacgacacggccgtatattactgtgcgagaagtataggagcagctggcgatggtgtttggttcgacccctggggccaggggacaatggtcaccgtctcgagt

SEQ ID NO: 146 - DNA, 363 bp, Homo Sapien
ggggtgcagctggtgcagtctgggggaggcttggtacagcctggggggtccctgagactctcctgtgcagcctctggattcacctttgatgattatgccatgcactgggtccggcaagctccagggaagggcctggagtgggtctcaagtattagttggcatagtcgtaccatagcctatgcggactctgtgaagggccgattctccatctccagagacaacgccaagaactccctctatctgcaaatgaacagtctgagacctgaggacacggccgtatattactgtgcgaaagcctcgtacctcagcacctcgtcctcccttgactattggggccgaggaaccctggtcaccgtctcgagt

SEQ ID NO: 147 - DNA, 366 bp, Homo Sapien
caggtgcagctgcaggagtccggcccaggactggtgaagccttcggggaccctgtccctcacctgcgctgtctctggtgtctccctcgccactaataactggtggctttgggtccgccagtccccagggaagggactggagtggattggagaaatttatcatagtggatacaccaactacaacccgtccctcaagagtcgagtcaccatatccgtagacaagtccagcaaccagctctccctggacctgaggtctatcaccgccgcggacacggccgtttattattgtgcgagaagatattgtgataatggtgtttgttatccctttgaccactggggccaggggacaatggtcaccgtctcgagt

SEQ ID NO: 148 - DNA, 333 bp, Homo Sapien
caggctgtgctgactcagccgtcctcagtgtctggggccccagggcagagggtcaccatctcctgcactgggagcagctccaacatcggggcaggttatgatgtacactggtaccagcagcttccaggaacagcccccaaactcctcatctttgataacaagaatcggccctcaggggtccctgaccgattctctggctccaactctggcacctcagcctccctggccatcactgggctccaggctgaagatgaggctgaatattactgccagtcgtatgacaacaacctgagtggccgggtgttcggcggagggaccaagctgaccgtccta

SEQ ID NO: 149 - DNA, 330 bp, Homo Sapien
cagtctgtgctgactcagcctggctccgtgtctgggtctcctggacagtcgatcaccatctcctgcactggaaccagcagtgacgttggtggttataactatgtctcctggtaccaacaacacccaggcaaagcccccaaactcatgatttatgagggcagtaagcggccctcaggggtttctaatcgcttctctggctccaagtctggcaacacggcctccctgacaatctctgggctccaggctgaggacgaggctgattattactgcagctcatatacaaccaggagcactcgagttttcggcggagggaccaagctgaccgtccta

SEQ ID NO: 150 - DNA, 330 bp, Homo Sapien
tcctatgtgctgactcagccaccctcggtgtctgaagcccccaggcagacggtcaccatctcctgttctggaaacagtttcaacatcgggagatatcctgtcaactggtatcaacaactcccagggaaggctcccaaactcctcatttattataataatctgaggttttcaggggtctctgaccgattctctggctccaagtctggcacctcagcctccctggccatcagggatctcctgtctgaggacgaggctgattactattgttcgacgtgggatgacaccctgaagggttgggtgttcggcggagggaccaagctgaccgtccta

SEQ ID NO: 151 - DNA, 399 bp, Homo Sapien
gaggtgcagctggtgcagtctggggccgaggtgaagaagcctggggcctcagtgaggatttcctgcaagacatctggattcacctttaccagctactttatccactgggtgcggcaggccccaggacaaaggccagagtggatgggcgttatcaacccaagccgtggcaacgcagactacgcaccgaggttccgtggcagagtcaccatgacccgggacaagtccacgcacactgtttacatggatctgaagagcctcagatctgacgacgcggccatatattactgtgccagagatcggcttggtggccttcttgattactacgacagtagtgattcttcgaagaattttgatgcttttgatttctggggccaaggaaccctggtcaccgtctcgagt

SEQ ID NO: 152 - DNA, 399 bp, Homo Sapien
caggtccagctggtgcagtctggggctgaggtgaagaagcctggggcctcagtgaggatttcctgcaagacatctggattcacctttaccagctactttatccactgggtgcggcaggccccaggacaaaggccagagtggatgggcgttatcaacccaagccgtggcaacgcagactacgcaccgaggttccgtggcagagtcaccatgacccgggacaagtccacgcacactgtttacatggatctgaagagcctcagatctgacgacgcggccatatattactgtgccagagatcggcttggtggccttcttgattactacgacagtagtgattcttcgaagaattttgatgcttttgatttctggggccagggaaccctggtcaccgtctcgagt

SEQ ID NO: 153 - DNA, 384 bp, Homo Sapien
gaagtgcagctggtgcagtctggggctgaggtgaagaagcctggggcctcagtgaaggtctcctgcaaggcttctggatacaccttcaccgattactatatgcactgggtacgacaggcccctggacaaggacttgagtggatgggatggatcaaccctaacagtggtggcacatactttccacagaactttcagggccgggtcaccatgaccagcgacccgtccatcagcgcagcctacatggaattgagtaacctgagatctgacgacacggccgtgtatttctgtgcaagaggcgcttacgattacgtttgggggagtcatcgttatagcggcgatgctttcgatttctggggccaaggaaccctggtcaccgtctcctca

SEQ ID NO: 154 - DNA, 342 bp, Homo Sapien
caggtgcagctggtgcagtctggggctgaggtgaagaagcctggggcctcagtgaaggtctcttgcaaggcttctggatacaacttcaccggctactatatgcactgggtgcgacaggcccctggacaagggcttgagtggatgggatggatcaaccctaacagtggtggcacaaactatgcacagaagtttcagggcagggtcaccatgaccagggacacgtccatcagcacagcctacatggagctgagcaggctgagatctgacgacacggccgtgtattactgtgcgacagactcctttgactactggggccagggaaccctggtcaccgtctcgagt

SEQ ID NO: 155 - DNA, 363 bp, Homo Sapien
gaagtgcagctggtgcagtctgggggaggcttggtacagcccggcaggtccctgagactctcctgtgcggcctctggattcacctctgatgattatgccatgcactgggtccggcaagctccagggaagggcctggactaggtcacagctatcacttggaatagtggtcacaaggactatgcggactctgtgaagggccgattcgccgtctccagagacaacgccaagaacgccctgtatctgcaaatgaacagtctgagacctgaggacacggccgtatattactgtgcgaaagcctcgtacctcagcacctcgtcctcccttgactactggggcagagggacaatggtcaccgtctcgagt

SEQ ID NO: 156 - DNA, 342 bp, Homo Sapien
gaagtccagctggtgcagtctggggctgaggtgaagaagcctggggcctcagtgaaggtctcctgcaaggcttctggatacaacttcaccggctactatatacactgggtgcgacaggcccctggacaagggcttgagtggatgggatggatcaaccctaacagtggtggcacaaactatgcacagaagtttcagggcagggtcatcatgaccagggacacgtccatcagcacagcctacatggagctgagcaggctgagatctgacgacacggccgtgtattactgtgcgacagactcctttgactactggggcagaggaaccctggtcaccgtctcgagt

SEQ ID NO: 157 - DNA, 351 bp, Homo Sapien
gaggtgcagctggtggagtctgggggagacttagttcagcctggggggtccctgagactctcctgtgcagcctctggattcaccttcagtgattcctggatgcactgggtccgccaagttccagggaagggactggagtgggtctcacatattggtattgatgggattaccacaaactacgcggactccgtgaagggccgattcaccatctccagggacaacgccaagaacaccctgtatctgcaaatgaacaatctgagagccgaagacacggctgtatattactgtgccaggaatgtagggtgggagtctcgcccttggggccaaggaaccctggtcaccgtctcgagt

SEQ ID NO: 158 - DNA, 348 bp, Homo Sapien
caggtccagctggtgcagtctggagctgaggtgaagaagcctggggctacagtgaaaatctcctgcaaggtttctggatacaccttcaccgactactacatccactgggtgcaacaggcccctggaaaagggcttgagtggatgggacttgttgatcctgaagatggtgaaacaatatacgcagagaagtttcagggcagagtcaccataattgcggacacgtctacagacacagcctacatggaactgagcagcctgagatctgaggacacggccgtctattactgtgcaactgggccgttccgtcttgactcctggggccaagggacaatggtcaccgtctcgagt

SEQ ID NO: 159 - DNA, 342 bp, Homo Sapien
caggtgcagctggtgcagtctggggctgaggtgaagaagcctggggcctcagtgaaggtctcctgcaaggcttctggatacaacttcaccggctactatatgcactgggtgcgacaggcccctggacaaggacttgagtggatgggatggatcaaccctaacagtggtggcacaaactatgcacagaagtttcagggcagggtcaccatgaccagggaaacgtccatcagcacagcctacatggagctgagcaggctgagatctgacgacacggccgtgtattactgtgcgacagactcctttgactactggggccgaggcaccctggtcaccatctcgagt

SEQ ID NO: 160 - DNA, 351 bp, Homo Sapien
caggtccagctggtgcagtctggggctgaggtgaagaagcctggggcctcagtgaaggtctcctgcaaggcttctggttacacctttaccagctatggtatcagctgggtgcgacaggcccctggacaagggcttgagtggatgggatggatcagcgcttacaatggtaacacaaactatgcacagaagctccagggcagagtcaccatgaccacagacacatccacgagcacagcctacatggagctgaggagcctgagatctgacgacacggccgtgtattactgtgcgagactggccagccgtgcttttgatatctggggcaggggcaccctggtcaccgtctcgagt

SEQ ID NO: 161 - DNA, 342 bp, Homo Sapien
caggtacagctgcagcagtcaggggctgaggtgaagaagcctggggcctcagtgaaggtctcttgcaaggcttctggatacaacttcaccggctactatatgcactgggtgcgacaggcccctggacaagggcttgagtggatgggatggatcaaccctaacagtggtggcacaaactatgcacagaagtttcagggcagggtcaccatgaccagggacacgtctatcagcacagcctacgtggagctgagcaggctgagatctgacgacacggccgtgtattactgtgcgacagactcctttgactactggggccggggcaccctggtcaccgtctcgagt

SEQ ID NO: 162 - DNA, 375 bp, Homo Sapien
caggtccagctggtacagtctggggctgaggtgaagaggcctggggcctcagttaacctttcctgcaaggcatctggatactccttcagcagatactatatccactgggtgcgacaggcccctggacagggacttgagttgatgggacggatcaaccctggaggtggtaccacaacctacgcacagaaattccagggcagagtcaccctgtccagggacacgtccacgaacaccatcttcatggaactgaacggcctcacatctgaagacacggccatgtattattgtgcgaggtcgaactacgatattttggctggttatgggcctgatgcttttgatttctggggccggggcaccctggtcaccgtctcgagt

SEQ ID NO: 163 - DNA, 342 bp, Homo Sapien
gaagtgcagctggtgcagtctggggctgaggtgaagaagcctggggcctcagtgaaggtctcttgcaaggcttctggatacaacttcaccggctactatatgcactgggtgcgacaggcccctggacaagggcttgagtggatgggatggatcaaccctaacagtggtggcacaaactatgcacagaagtttcagggcagggtcaccatgaccagggacacgtccatcagcacagcctacatggagctgagcaggctgagatctgacgacacggccgtgtattactgtgcgacagactcctttgactactggggccaggggacaatggtcaccgtctcgagt

SEQ ID NO: 164 - DNA, 363 bp, Homo Sapien
gaggtgcagctggtggagtctggggggggcttggctcagcctggaaagtccctcagaatatcctgtgcagcctctggattcacctttggcgactacgccatgacgtgggtccgccaggctccagggaagggactggagtgggtctcaagtataagtggtagtggttctggcacatattatacagactccgtgaagggccgcttcgccatctccagagacaactccaagaacacactatatccgcagatgaacagcctggcagccgaggacacggccatttatttctgtgcaaaagatcagacagatgtgactatccgggactttgactactggggcaggggaaccctggtcaccgtctcgagt

SEQ ID NO: 165 - DNA, 357 bp, Homo Sapien
caggtgcagctggtgcagtctggagctgaggtgaagaagcctggggcctcagtgaaggtctcctgcaaggcttctggttacacctttaccaactatggtctcagctgggtgcgacaggcccctggacaagggcttgagtggatgggatggatcagcggttacaatgataacacaagctatgcacagaagttccaggacagaatcactatgaccacagacacatccacgagcacagcctccatggagctgaggagcctgagatctgacgacacggccgtgtattactgtgcgtttagttattatgatagtagtggttatttcaactggggccaggggacaatggtcaccgtctcgagt

SEQ ID NO: 166 - DNA, 378 bp, Homo Sapien
caggtacagctgcagcagtcaggggctgaggtaaagaagcctgggtcctcggtgaaggtctcctgcagggcttctggaggcaccttcagcaactacgctatcagctgggtgcgacaggcccctggacaaggccttgagtggatgggacggatcatccctatctttggaggagcacactacgcacagaagttacagggcagagtctcgattaccgcggacgagtcgacgagcacagcccacatggagctgagcagcctgagatctgaggacgcggccgtgtactactgtgcgagcggagcgtattacgatgttatgggtaattatccttactcaggtatggacgtctggggccgaggcaccctggtcaccgtctcgagt

SEQ ID NO: 167 - DNA, 375 bp, Homo Sapien
gaggtgcagctggtgcagtctggggctgaggtgaagaagcctggggcctcagttaacctttcctgcaaggcatctggatactccttcagcaggtactatatccactgggtgcgacaggcccctggacaaggacttgagttgatgggacggatcaaccctggaggtggtaccacaacctacgcacagaaattccagggcagagtcaccctgtccagggacacgtccacgaacaccatcttcatggaactgaacggcctcacatctgaagacacggccatgtattattgtgcgaggtcgaactacgatattttggctggttatgggcctgatgcttttgatttctggggccgagggacaatggtcaccgtctcgagt

SEQ ID NO: 168 - DNA, 351 bp, Homo Sapien
gaggtgcagctggtggagtctggagctgaggtgaagaagcctggggcctcagtgaaggtctcctgcaaggcttctggttacacctttaccacctatggtatcagctgggtgcgacaggcccctggacaagggcttgagtggatgggatggatcagcacttacaatggtaacacaaaatatgcacagaagctccagggcagagtcaccatgaccacagacacatccacgagcacagcctacatggagctgaggagcctgagatctgacgacacggccgtgtattactgtgcgagagatgcaaggaaagcctttgatatctggggcagaggcaccctggtcaccgtctcttca

SEQ ID NO: 169 - DNA, 351 bp, Homo Sapien
caggtgcagctggtgcagtctgggggagggttggtccagcctggggggtccctaagactgtcctgtggagcctctgggttcacctttagtagccattggatgagctgggtccgccggcctccagggagggggctggaatgggtggccaacataaacgagggtggcagtgcggaatattatgcggactctctgaagggccgattcaccatctcccgagacaacgccaagaactccctgtttctgcaaatggacagcctgagagccgaggacacggccgtctattactgtgtgagagatcaattccacagtaactacgactggggccaggggacaatggtcaccgtctcgagt

SEQ ID NO: 170 - DNA, 342 bp, Homo Sapien
caggtccagctggtgcagtctggagctgggctgaagaggccggggacctcagtgaaaatatcctgcaagacttctggatacatcttcagtcaatatcccatgcactgggtgcgccaggcccccggacaagggcttgagtgggtggcatgggtcgacactggcaatggtaccacaagatattcgccgaatttccagggcagagccaccgttagtggagacacatccgcgaacacaggctacttggaattgagaagcctgagatttaccgacacggctgtttattactgtgcgactaacgcctttgactactggggccgaggcaccctggtcaccgtctcgagt

SEQ ID NO: 171 - DNA, 342 bp, Homo Sapien
gaggtccagctggtacagtctggggctgaggtgaagaagcctggggcctcagtgaaggtctcctgcaaggcttctggatacaacttcaccggctactatatgcactgggtgcgacaggcccctggacaagggcttgagtggatgggatggatcaaccctaacagtggtggcacaaactatgcacagaagtttcagggcagggtcaccatgaccagggacacgtccatcagcacagcctacatggagctgagcaggctgagatctgacgacacggccgtgtattactgtgcgacagactcctttgactactggggccgaggcaccctggtcaccgtctcgagt

SEQ ID NO: 172 - DNA, 342 bp, Homo Sapien
caggtgcagctgcaggagtccggagctgaggtgaagaagcctggggcctcagtgaaggtctcttgcaaggcttctggatacaacttcaccggctactatatgcactgggtgcgacaggcccctggacaagggcttgagtggatgggatggatcaaccctaacagtggtggcacaaactatgcacagaagtttcagggcagggtcaccatgaccagggacacgtccatcagcacagcctacatggagctgagcaggctgagatctgacgacacggccgtgtattactgtgcgacagactcctttgactactggggccgggggacaatggtcaccgtctcgagt

SEQ ID NO: 173 - DNA, 342 bp, Homo Sapien
caggtccagctggtgcagtctggggctgaggtgaagaagcctggggcctcagtgaaggtctcctgcaaggcttctggatacaacttcaccggctactatatgcactgggtgcgacaggcccctggacaagggcttgagtggatgggatggatcaaccctaacagtggtggcacaaactatgcacagaagtttcagggcagggtcaccatgaccagggacacgtccatcagcacagcctacatggagctgagcaggctgagatctgacgacacggccgtgtattactgtgcgacagactcctttgactactggggccggggcaccctggtcaccgtctcgagt

SEQ ID NO: 174 - DNA, 342 bp, Homo Sapien
gaggtccagctggtgcagtctggggctgaggtgaagaagcctggggcctcagtgaaggtctcttgcaaggcttctggatacaacttcaccggctactatatgcactgggtgcgacaggcccctggacaagggcttgagtggatgggatggatcaaccctaacagtggtggcacaaactatgcacagaagtttcagggcagggtcaccatgaccagggacacgtccatcagcacagcctacatggagctgagcaggctgagatctgacgacacggccgtgtattactgtgcgacagactcctttgactactggggccaggggacaatggtcaccgtctcgagt

SEQ ID NO: 175 - DNA, 342 bp, Homo Sapien
caggtgcagctggtgcaatctggggctgaggtgaagaagcctggggcctcagtgaaggtctcttgcaaggcttctggatacaacttcaccggctactatatgcactgggtgcgacaggcccctggacaagggcttgagtggatgggatggatcaaccctaacagtggtggcacaaactatgcacagaagtttcagggcagggtcaccatgaccagggacacgtccatcagcacagcctacatggagctgagcaggctgagatctgacgacacggccgtgtattactgtgcgacagactcctttgactactggggccaagggacaatggtcaccgtctcgagt

SEQ ID NO: 176 - DNA, 342 bp, Homo Sapien; identical to SEQ ID NO: 111

SEQ ID NO: 177 - DNA, 342 bp, Homo Sapien
caggtgcagctggtgcagtctggggctgaggtgaagaagcctggggcctcagtgaaggtctcttgcaaggcttctggatacaacttcaccggctactatatgcactgggtgcgacaggcccctggacaagggcttgagtggatgggatggatcaaccctaacagtggtggcacaaactatgcacagaagtttcagggcagggtcaccatgaccagggacacgtccatcagcacagcctacatggagctgagcaggctgagatctgacgacacggccgtgtattactgtgcgacagactcctttgactactgggggcgagggaccacggtcaccgtctcgagt

SEQ ID NO: 178 - DNA, 342 bp, Homo Sapien
caggtgcagctggtgcagtctggggctgaggtgaagaagcctggggcctcagtgaaggtctcttgcaaggcttctggatacaacttcaccggctactatatgcactgggtgcgacaggcccctggacaagggcttgagtggatgggatggatcaaccctaacagtggtggcacaaactatgcacagaagtttcagggcagggtcaccatgaccagggacacgtccatcagcacagcctacatggagctgagcaggctgagatctgacgacacggccgtgtattactgtgcgacagactcctttgactactggggccaggggacaatggtcaccgtctcgagt

SEQ ID NO: 179 - DNA, 333 bp, Homo Sapien
aattttatgctgactcagccccactctgtgtcggagtctccggggaagacggtaatcatctcctgcactcgcagcagtggcagcattgccagcaactatgtgcagtggctccagcagcgcccgggcagttcccccaccactgtgatttatgacgataatcgaagaccctctggagtccctgatcggttttctggctccatcgacggttcctccaactcggcctccctcaccatctctggcctgaagacagaggacgaggctgattactactgtcagtcttatgatcgattcgaccatgtggttttcggcggagggaccaagctgaccgtccta

SEQ ID NO: 180 - DNA, 321 bp, Homo Sapien
gacatccagatgacccagtctccatcctcactgtctgcatttgtgggagacagagtcaccatcacttgtcgggcgagtcagggcattaataattatttagcctggtttcagcagaagccagggaaagcccctaagtccctgatctacgccgcctccactttgcgaagtggggtcccaccaaggttcagcggcagtggatctgggacagatttcactctcaccatcagcagcctgcagcctgaagattttgcaacttattactgccaacagtatgatagttaccctcacaccttcggccaggggacacgactggagattaaa

SEQ ID NO: 181 - DNA, 330 bp, Homo Sapien
cagtctgtgctgactcagccaccctcagcgtctgggacccccgggcagagggtcaccatctcttgttctggaagcagctccaacatcgggagtaacactgtaaattggtaccagcgactcccaggagcggccccccaactcctcatctacaataatgaccagcggccctcagggatccctgaccgattctctggctccaagtctggcacctcaggttccctggtcatcagtgggctccagtctgaagatgaggctgattactactgtgcgtcatgggatgacagtctgaatggtcgggtgttcggcggagggaccaagctgaccgtccta

SEQ ID NO: 182 - DNA, 330 bp, Homo Sapien
tcctatgagctgactcagccaccctcagcgtctgggacccccgggcagagggtcaccatctcttgttctggaagcagctccaacatcggaagtaatactgtaaactggtaccagcagctcccaggaacggcccccaaactcctcatctatagtaataatcagcggccctcaggggtccctgaccgattctctggctccaagtctggcacctcagcctccctggccatcagtgggctccagtctgaggatgaggctgattattactgtgcagcatgggatgacagcctgaatggttatgtcttcggaactgggaccaagctgaccgtccta

SEQ ID NO: 183 - DNA, 324 bp, Homo Sapien
tcctatgtgctgactcagccaccctcggtgtcagtggccccaggacagacggccaggattacctgtgggggaaacaacattggaagtaaaagtgtgcactggtaccagcagaagccaggccaggcccctgtgctggtcatctatgaggacagcaaacgaccctccgggatccctgagagattctctggctccagctcagggacaatggccaccttgactatcagtggggcccaggtggaggatgaagctgactactactgttactcaacagacagcagtggtaatcatagggtcttcggaactgggaccaaggtcaccgtccta

SEQ ID NO: 184 - DNA, 330 bp, Homo Sapien
cagtctgtgctgactcagccaccctcagcgtctgggacccccgggcagagggtcaccatctcttgttctggaagctactccaacatcggaagtaattatgtctactggtaccagcagttcccaggaacggcccccaaactcctcatctatacgaataatcagcggccctcaggggtccctgaccgattctctggctccaagtctggctcctcagcctcccttgccatcagtgggctccggtccgaggatgaggctgattattactgtgcagcatgggatgacagtgtgggtgtcctgttattcggcggggggaccaagctgaccgtccta

SEQ ID NO: 185 - DNA, 333 bp, Homo Sapien
tcctatgtgctgactcagccaccctcagcgtctggggcccccggccagagggtcaccatctcttgttctggaagcgactccaacatcggacgtaacactgttaactggtaccagcagcagctccctggaacggcccccacactcctcatctatactaataatcagcggccctcaggggtccctgaccgattctctggctccaagtctggcacctcagcctccctggccatcagtgggctccagtctggggatgaggctgattattactgtgcagcatgggatgacagcctcaatgcttattttttcgggcctgggaccaagctgaccgtccta

SEQ ID NO: 186 - DNA, 336 bp, Homo Sapien
cagtctgtgttgacgcagccgccctcagtttctggggccccagggcagagggtcaccatctcctgcactgggagcagctccaacatcggggcaggttatgatgtacactggtaccagcagcttccaggatcagcccccaaactcctcatctatggtaacaacaatcggccctcaggggtccctgaccgattctctggctccaagtctggcacctcagcctccctggccatcactgggctccaggctgaggatgaggctgattattactgccagtcctttgacaacaggctgagtgattttaatgtcttcggaactgggaccaaggtcaccgtccta

SEQ ID NO: 187 - DNA, 330 bp, Homo Sapien
cagtctgtgctgacgcagccgccctcagcgtctgggacccccgggcagagggtcaccatctcttgttctggaagcagctccaacatcggaagtaattatgtatactggtaccagcagctcccaggaacggcccccaaactcctcatctataggaataatcagcggccctcaggggtccctgaccgattctctggctccaagtctggcacctcagcctccctggccatcagtgggctccggtccgaggatgaggctgattattactgtgcagcatgggatgacagcctgagtggtctggtattcggcggagggaccaagctgaccgtccta

SEQ ID NO: 188 - DNA, 330 bp, Homo Sapien
cagtctgtgctgactcagcctgcctccgtgtctgggtctcctggacagtcgatcaccatctcctgcactggaaccagcagtgacgttggtggttataactatgtctcctggtaccaacaacacccaggcaaagcccccaaactcatgatttatgagggcagtaagcggccctcaggggtttctaatcgcttctctggctccaagtctggcaacacggcctccctgacaatctctgggctccaggctgaggacgaggctgattattactgcagctcatatacaaccaggagcactcgagttttcggcggagggaccaagctgaccgtccta

SEQ ID NO: 189 - DNA, 333 bp, Homo Sapien
cagtctgtgttgacgcagccgccctcagcgtctgggacccccgggcagagggtcaccatctcttgttctggaagcagctccaacatcggaagtaatcctgtaaactggtaccagcagctcccaggaacggcccccaaactcctcatctatagtaataatcagcggccctcaggggtccctgaccgattctctggctccaagtctggcacctcagcctccctggccatcagtgggctccactctgaggatgaggctgattattactgtgcagcatgggatgacagcctgaatgggtcttctgtcttcggaactgggaccaagctgaccgtccta

SEQ ID NO: 190 - DNA, 333 bp, Homo Sapien
caggctgtgctgactcagccgtcctcagtgtctggggccccagggcagagggtcaccatctcctgcactgggagcagctccaacatcggggcagataatgatgttcattggtaccaaaagtttccaggaacagcccccaaactcctcatcttttctaacaacaatcggccctcaggggtccctgaccggttctctggctccaagtctggcacctcagcctctctggccatcactggactccaggctgacgatgaggctgattattactgccagtcatatgatagcggcctgacgagggagttgttcggcggagggaccaagctgaccgtccta

SEQ ID NO: 191 - DNA, 330 bp, Homo Sapien
cagtctgtcgtgacgcagccgccctcagcgtctgggtcccccgggcagagggtcaccatcgcttgttctggaagcagctccaacatcggaagtaatactgtaaactggtaccagcacgttccaggaacggcccccaaactcctcatctataataataatcagcggccctcaggggtccaagatcgattctctggctccaagtctgacacttcagcctccctggccatcagtggtctccaggctgaggatgaggctgtttattactgtgcgacatgggatgacagcctgattggtctagcgttcggcggagggaccaagctgaccgtccta

SEQ ID NO: 192 - DNA, 324 bp, Homo Sapien
tcctatgagctgactcagccaccctcggtgtcggtggccccgggacagacggccaggatttcctgtgggggagacaaccttggacgtaaaagcgtgcactggtaccagcagaagccaggccaggcccctgtgctggtcatctatgaggacagcaaacgaccctccgggatccctgagagattctctggctccagctcagggacaatggccaccttgactatcagtggggcccaggtggaggatgaagctgactactactgttactcaacagacagcagtggtaatcatagggtgttcggcggagggaccaaggtcaccgtccta

SEQ ID NO: 193 - DNA, 333 bp, Homo Sapien
caggctgtgctgactcagccgtcctcagtgtctggggccccagggcagagggtcaccgtctcctgcactgggagcagctccaatatcgggacaggttatgctgtacactggtaccagcagcttccaggaacagcccccagactcctcatctttggaaacaacaatcggccctcaggggtccctgaccgattctctggctccaagtctggcacctcagcctccctggtcatcactgggctccaggctgaggatgaggctgattattactgccagtcctttgacacccttagtggttcgagggtgttcggcggagggaccaaggtcaccgtccta

SEQ ID NO: 194 - DNA, 324 bp, Homo Sapien
tcctatgtgctgactcagccaccctcggtgtcagtgtcccccggccagacggccaagatcacctgtgggggagacaagattgagacaaaaagtgtgcactggtaccagcagaagccgggccaggcccctgttctggtcatctatgaggacaccaaacgaccctccgggatctctgagagattgtcgggctccagcgcagggacagtggccacgttgaccatcactggggcccaggtggacgatgaggctgactacttttgttattccacagacgccaccggtactgaaagggtcttcggcggagggaccaagctgaccgtccta

SEQ ID NO: 195 - DNA, 330 bp, Homo Sapien
cagtctgtgctgactcagccaccctcagtgtctggggccccagggcagagggtcaccatctcctgcattgggagcaactccaacatcggggcaggtcatgatgtacactggtaccagcagtttccaggaacagcccccaaactcctcatctatgataacaccaaccggccctcaggggtccctgaccgattctctggctccaagtctggcacctcagtttccctggccatcactgggctccaggctgaggatgaggctgattattactgccagtcctatgacagcagcctgggtgaggtgttcggcggagggaccaagctgaccgtccta

SEQ ID NO: 196 - DNA, 330 bp, Homo Sapien
cacgttatactgactcaacctcgctcagtgtctgggtctcctggacagtcgatcaccatctcctgcactggaaccagcagtgacgttggtggttataactatgtctcctggtaccaacaacacccaggcaaagcccccaaactcatgatttatgagggcagtaagcggccctcaggggtttctaatcgcttctctggctccaagtctggcaacacggcctccctgacaatctctgggctccaggctgaggacgaggctgattattactgcagctcatatacaaccaggagcactcgagttttcggcggagggaccaagctgaccgtccta

SEQ ID NO: 197 - DNA, 333 bp, Homo Sapien
caggctgtgctgactcagccgtcctcagtgtctggggccccagggcagagggtcaccatctcctgcactgggagcagctccaacatcggggcaccttttgatgtacactggtaccagcagcttccaggaacagcccccaaactcctcatctatggtaacagtaatcggccctcaggagtccctgaccgcttctctggctccaagtttggcacctcagcctccctggccatcactgggctccaggctgcggatgaggctgattattactgccagtcttatgacagcagcctgagtggttgggtgttcggcggagggaccaagctgaccgtccta

SEQ ID NO: 198 - DNA, 324 bp, Homo Sapien
tcctatgagctgactcagccaccctcggtgtcagtgtccccaggacaaacggccaggatcacctgctctggagatgcattgccagacaaatatgttcattggtaccagcagaagtcaggccaggcccctgtcctggtcctcttcgacgacagtaagcgaccctccggtatccctgagagattctctggctccagctcagggacagtggccaccttgattatcagtggggcccaggtggaggatgaaggtgacttcttctgttactcaacagacagcagtggtaatgaaagggttttcggcggagggaccaagctgaccgtccta

SEQ ID NO: 199 - DNA, 330 bp, Homo Sapien
cagtctgtgctgactcagccaccctcagcgtctgggacccccgggcagagggtcaccatctcttgttctggaagcagctccaacatcggaagtaattctgtatactggtaccagcagctcccaggaacggcccccaaactcctcatctataggaataatcagcggccctcaggggtccctgaccgattctctggctccaagtctggcacctcagcctccctggccatcagtgggctccggtccgaggatgaggctgattattactgtgcagcatgggatgacagcctgagtggtctggtcttcggcggagggaccaagctgaccgtccta

SEQ ID NO: 200 - DNA, 330 bp, Homo Sapien
tcctatgtgctgactcagccaccctcagcgtctgggacccccgggcagagggtcaccatctcttgttctgggagcagctccaacatcggaagtaatactgtacactggtaccagcagctcccagaaacggcccccaaactcctcatctatactaataatcagcggccctcaggggtccctgaccgattctctggctccaagtctggcacctcagcctccctggccatcagtgggctccagtctgaggacgaggctgactattactgtgcttcatgggatgacagcctgaaagcttatgtcttcggaactaggaccaagctgaccgtccta

SEQ ID NO: 201 - DNA, 330 bp, Homo Sapien
cagtctgtgctgactcagccaccctctgcgtctgggacccccgggcagagggtcaccatctcttgttctggaagcaggtccagcatcggaagtaatactgtaagctggtaccagcaactcccaggaacggcccccaaactcatcatctatactaataatcagcggccctccggggtccctgaccgattctctggctccaagtctggcacctcagccaccctggccatcagtgggctccagtctgaggatgaggctgattattactgtgcatcatgggatgacagcctgaatgattatgtcttcggagttgggaccaaggtcaccgtccta

SEQ ID NO: 202 - DNA, 330 bp, Homo Sapien
tcctatgtgctgactcagccaccctcagcgtctgggacccccgggcagagggtcaccatctcttgttctggaagcagctccaacatcggaagtaatactgtaaactggtaccagcagctcccaggaacggcccccaaactcctcatctataatgataatgagcggccctctggggtccctgaccgattctcgggctccaagtctggcacctacgcctccctggccatcagtgggctccagtctgaggatgaggctgattattactgtgcagcttgggatgacagcctgaatggtctggctttcggcggagggaccaagctgaccgtccta

SEQ ID NO: 203 - DNA, 330 bp, Homo Sapien
ctgcctgtgctgactcagcccccctcagcgtctgggacccccgggcagagggtcaccatctcttgttctggaagcagctccaacatcggaagtaatattgtaaactggtaccagcagctcccaggaacggcccccaaactcctcatctatactagtaatcagcggccctcaggggtccctgaccgattctctggctccaagtctggcacctcagcctccctggccatcagtgggctccagtctgaggatgaggctgattattactgtgcagcatgggatgacagcctgaatgctgtggtattcggcggagggaccaaggtcaccgtccta

SEQ ID NO: 204 - DNA, 330 bp, Homo Sapien
tcctatgagctgactcagccaccctcagtttctgggacccccgggcagagggtcaccatctcttgttctggaagcagttccaacatcgaaagtaatgctgtccattggtaccaacacctcccaggaagggcccccaaactcctcatctttagtcataatcagcggccctcaggtgtccctgcccgcttctctggctccaagtctggcacctcagcctccctggccatcagtgggctccagtctgaggatgaggctgactattactgtgcagcttgggatgacagcctgagtggttatgtcttcgcatctgggaccaagctgaccgtccta

SEQ ID NO: 205 - DNA, 330 bp, Homo Sapien
tcctatgtgctgactcagccaccctcagtttctgggacccccgggcagagggtcaccatctcttgttctggaagcagttccaacatcgaaagtaatgctgtccattggtaccaacacctcccaggaagggcccccaaactcctcatctttagtcataatcagcggccctcaggtgtccctgcccgcttctctggctccaagtctggcacctcagcctccctggccatcagtgggctccagtctgaggatgaggctgactattactgtgcagcttgggatgacagcctgagtggttatgtcttcgcatctgggaccaaggtcaccgtccta

SEQ ID NO: 206 - DNA, 330 bp, Homo Sapien
cagtctgtgctgactcagccaccctcagcgtctgggacccccgggcagagggtcaccatctcttgttctggaggcagatccaatatcggaactaattatgtgtactggtaccagaaattaccaggcacggcccccaaatccctcatctatactactaatcagcgcccctcaggggtccctgaccgattctctggctccaaggctggcacctcagcctccctggccatcagtgggctccggtccgaggatgagggtgattattactgtgcctcgtgggatgaaagcctgaatggtgtggtgttcggcggagggaccaaggtcaccgtccta

SEQ ID NO: 207 - protein, 8 aa, Homo Sapien
GYNFTGYY

SEQ ID NO: 208 - protein, 7 aa, Homo Sapien
INPNSGG

SEQ ID NO: 209 - protein, 7 aa, Homo Sapien
ATDSFDY

SEQ ID NO: 210 - protein, 8 aa, Homo Sapien
GFTFTSYF

SEQ ID NO: 211 - protein, 7 aa, Homo Sapien
INPSRGN

SEQ ID NO: 212 - protein, 26 aa, Homo Sapien
ARDRLGGLLDYYDSSDSSKNFDAFDF

SEQ ID NO: 213 - protein, 8 aa, Homo Sapien
GFTFTSSA

SEQ ID NO: 214 - protein, 7 aa, Homo Sapien
IVVGSGN

SEQ ID NO: 215 - protein, 6 aa, Homo Sapien
VADTVY

SEQ ID NO: 216 - protein, 8 aa, Homo Sapien
GFTFSSYS

SEQ ID NO: 217 - protein, 7 aa, Homo Sapien
ISSSGSS

SEQ ID NO: 218 - protein, 13 aa, Homo Sapien
TRGTQWLAGVGDY

SEQ ID NO: 219 - protein, 8 aa, Homo Sapien
GYSFNKYY

SEQ ID NO: 220 - protein, 7 aa, Homo Sapien
INPGSGT

SEQ ID NO: 221 - protein, 18 aa, Homo Sapien
ARSNYDILAGYGPDAFDI

SEQ ID NO: 222 - protein, 8 aa, Homo Sapien
SSNIGNNA

SEQ ID NO: 223 - protein, 11 aa, Homo Sapien
AAWDDSLNGVV

SEQ ID NO: 224 - protein, 8 aa, Homo Sapien
NSNIGSNY

SEQ ID NO: 225 - protein, 11 aa, Homo Sapien
AAWDDSLSGVV

SEQ ID NO: 226 - protein, 8 aa, Homo Sapien
SSNIGSNT

SEQ ID NO: 227 - protein, 11 aa, Homo Sapien
AAWDDSLNGVV

SEQ ID NO: 228 - protein, 8 aa, Homo Sapien
SSNIGSNY

SEQ ID NO: 229 - protein, 8 aa, Homo Sapien
SSNIGSNF

SEQ ID NO: 230 - protein, 11 aa, Homo Sapien
ATWDDNLSGVV

SEQ ID NO: 231 - protein, 8 aa, Homo Sapien
SSNIGRHT

SEQ ID NO: 232 - protein, 11 aa, Homo Sapien
AAWDASLKNWV

SEQ ID NO: 233 - protein, 11 aa, Homo Sapien
AAWDDSLNGLV

SEQ ID NO: 234 - protein, 11 aa, Homo Sapien
AAWDDSLNGAV

SEQ ID NO: 235 - protein, 8 aa, Homo Sapien
SPNIGSNT

SEQ ID NO: 236 - protein, 11 aa, Homo Sapien
AAWDDSLLGVV

SEQ ID NO: 237 - protein, 8 aa, Homo Sapien
ISNIGDNT

SEQ ID NO: 238 - protein, 11 aa, Homo Sapien
ASWDDSLDGVF

SEQ ID NO: 239 - protein, 8 aa, Homo Sapien
SSNIGKNA

SEQ ID NO: 240 - protein, 11 aa, Homo Sapien
AAWDDSLSGWV

SEQ ID NO: 241 - protein, 9 aa, Homo Sapien
SSNIGAGYD

SEQ ID NO: 242 - protein, 11 aa, Homo Sapien
QSYDSSLTGSI

SEQ ID NO: 243 - protein, 11 aa, Homo Sapien
QSYDSSLSGSL

SEQ ID NO: 244 - protein, 8 aa, Homo Sapien
YSNIGSNY

SEQ ID NO: 245 - protein, 11 aa, Homo Sapien
AAWDDSVSVLL

SEQ ID NO: 246 - protein, 8 aa, Homo Sapien
NSNIGSNT

SEQ ID NO: 247 - protein, 11 aa, Homo Sapien
AAWDDSLNGLI

SEQ ID NO: 248 - protein, 11 aa, Homo Sapien
QSYDSSLSGSV

SEQ ID NO: 249 - protein, 9 aa, Homo Sapien
SSDVGAYDS

SEQ ID NO: 250 - protein, 10 aa, Homo Sapien
SSYRNTKTVV

SEQ ID NO: 251 - protein, 8 aa, Homo Sapien
SSNIGSNI

SEQ ID NO: 252 - protein, 9 aa, Homo Sapien
SSNIGSSVD

SEQ ID NO: 253 - protein, 11 aa, Homo Sapien
QSYDSSLSSEV

SEQ ID NO: 254 - protein, 9 aa, Homo Sapien
GVSLATNNW

SEQ ID NO: 255 - protein, 6 aa, Homo Sapien
IYHSGY

SEQ ID NO: 256 - protein, 15 aa, Homo Sapien
ARRYCDNGVCYPFDH

SEQ ID NO: 257 - protein, 8 aa, Homo Sapien
GGTLSSYT

SEQ ID NO: 258 - protein, 7 aa, Homo Sapien
IIPILDR

SEQ ID NO: 259 - protein, 15 aa, Homo Sapien
ARSIGAAGDGVWFDP

SEQ ID NO: 260 - protein, 8 aa, Homo Sapien
GFTFDDYA

SEQ ID NO: 261 - protein, 7 aa, Homo Sapien
ISWHSRT

SEQ ID NO: 262 - protein, 14 aa, Homo Sapien
AKASYLSTSSSLDY

SEQ ID NO: 263 - protein, 8 aa, Homo Sapien
SFNIGRYP

SEQ ID NO: 264 - protein, 11 aa, Homo Sapien
STWDDTLKGWV

SEQ ID NO: 265 - protein, 11 aa, Homo Sapien
QSYDNNLSGRV

SEQ ID NO: 266 - protein, 9 aa, Homo Sapien
SSDVGGYNY

SEQ ID NO: 267 - protein, 10 aa, Homo Sapien
SSYTTRSTRV

SEQ ID NO: 268 - protein, 8 aa, Homo Sapien
GYTFTDYY

SEQ ID NO: 269 - protein, 21 aa, Homo Sapien
ARGAYDYVWGSHRYSGDAFDF

SEQ ID NO: 270 - protein, 8 aa, Homo Sapien
GYSFSRYY

SEQ ID NO: 271 - protein, 7 aa, Homo Sapien
INPGGGT

SEQ ID NO: 272 - protein, 18 aa, Homo Sapien
ARSNYDILAGYGPDAFDF

SEQ ID NO: 273 - protein, 8 aa, Homo Sapien
GFTFGDYA

SEQ ID NO: 274 - protein, 7 aa, Homo Sapien
ISGSGSG

SEQ ID NO: 275 - protein, 14 aa, Homo Sapien
AKDQTDVTIRDFDY

SEQ ID NO: 276 - protein, 8 aa, Homo Sapien
GYTFTNYG

SEQ ID NO: 277 - protein, 7 aa, Homo Sapien
ISGYNDN

SEQ ID NO: 278 - protein, 12 aa, Homo Sapien
AFSYYDSSGYFN

SEQ ID NO: 279 - protein, 8 aa, Homo Sapien
GGTFSNYA

SEQ ID NO: 280 - protein, 7 aa, Homo Sapien
IIPIFGG

SEQ ID NO: 281 - protein, 19 aa, Homo Sapien
ASGAYYDVMGNYPYSGMDV

SEQ ID NO: 282 - protein, 8 aa, Homo Sapien
GYTFTTYG

SEQ ID NO: 283 - protein, 7 aa, Homo Sapien
ISTYNGN

SEQ ID NO: 284 - protein, 10 aa, Homo Sapien
ARDARKAFDI

SEQ ID NO: 285 - protein, 8 aa, Homo Sapien
GFTFSSHW

SEQ ID NO: 286 - protein, 7 aa, Homo Sapien
INEGGSA

SEQ ID NO: 287 - protein, 10 aa, Homo Sapien
VRDQFHSNYD

SEQ ID NO: 288 - protein, 8 aa, Homo Sapien
GYIFSQYP

SEQ ID NO: 289 - protein, 7 aa, Homo Sapien
VDTGNGT

SEQ ID NO: 290 - protein, 7 aa, Homo Sapien
ATNAFDY

SEQ ID NO: 291 - protein, 8 aa, Homo Sapien
GYTFTSYG

SEQ ID NO: 292 - protein, 7 aa, Homo Sapien
ISAYNGN

SEQ ID NO: 293 - protein, 10 aa, Homo Sapien
ARLASRAFDI

SEQ ID NO: 294 - protein, 8 aa, Homo Sapien
GFTSDDYA

SEQ ID NO: 295 - protein, 7 aa, Homo Sapien
ITWNSGH

SEQ ID NO: 296 - protein, 8 aa, Homo Sapien
GFTFSDSW

SEQ ID NO: 297 - protein, 7 aa, Homo Sapien
IGIDGIT

SEQ ID NO: 298 - protein, 10 aa, Homo Sapien
ARNVGWESRP

SEQ ID NO: 299 - protein, 7 aa, Homo Sapien
VDPEDGE

SEQ ID NO: 300 - protein, 9 aa, Homo Sapien
ATGPFRLDS

SEQ ID NO: 301 - protein, 8 aa, Homo Sapien
SGSIASNY

SEQ ID NO: 302 - protein, 10 aa, Homo Sapien
QSYDRFDHVV

SEQ ID NO: 303 - protein, 11 aa, Homo Sapien
ASWDDSLNGRV

SEQ ID NO: 304 - protein, 6 aa, Homo Sapien
QGINNY

SEQ ID NO: 305 - protein, 9 aa, Homo Sapien
QQYDSYPHT

SEQ ID NO: 306 - protein, 8 aa, Homo Sapien
SSNIESNA

SEQ ID NO: 307 - protein, 11 aa, Homo Sapien
AAWDDSLSGYV

SEQ ID NO: 308 - protein, 8 aa, Homo Sapien
RSNIGTNY

SEQ ID NO: 309 - protein, 11 aa, Homo Sapien
ASWDESLNGVV

SEQ ID NO: 310 - protein, 8 aa, Homo Sapien
SSNIGSNP

SEQ ID NO: 311 - protein, 12 aa, Homo Sapien
AAWDDSLNGSSV

SEQ ID NO: 312 - protein, 9 aa, Homo Sapien
SSNIGADND

SEQ ID NO: 313 - protein, 11 aa, Homo Sapien
QSYDSGLTREL

SEQ ID NO: 314 - protein, 11 aa, Homo Sapien
ATWDDSLIGLA

SEQ ID NO: 315 - protein, 6 aa, Homo Sapien
NLGRKS

SEQ ID NO: 316 - protein, 11 aa, Homo Sapien
YSTDSSGNHRV

SEQ ID NO: 317 - protein, 9 aa, Homo Sapien
SSNIGTGYA

SEQ ID NO: 318 - protein, 11 aa, Homo Sapien
QSFDTLSGSRV

SEQ ID NO: 319 - protein, 6 aa, Homo Sapien
KIETKS

SEQ ID NO: 320 - protein, 11 aa, Homo Sapien
YSTDATGTERV

SEQ ID NO: 321 - protein, 9 aa, Homo Sapien
NSNIGAGHD

SEQ ID NO: 322 - protein, 10 aa, Homo Sapien
QSYDSSLGEV

SEQ ID NO: 323 - protein, 10 aa, Homo Sapien
SSYTTRSTRV

SEQ ID NO: 324 - protein, 9 aa, Homo Sapien
SSNIGAPFD

SEQ ID NO: 325 - protein, 11 aa, Homo Sapien
QSYDSSLSGWV

SEQ ID NO: 326 - protein, 6 aa, Homo Sapien
ALPDKY

SEQ ID NO: 327 - protein, 11 aa, Homo Sapien
YSTDSSGNERV

SEQ ID NO: 328 - protein, 8 aa, Homo Sapien
SSNIGSNS

SEQ ID NO: 329 - protein, 11 aa, Homo Sapien
AAWDDSLSGLV

SEQ ID NO: 330 - protein, 11 aa, Homo Sapien
ASWDDSLKAYV

SEQ ID NO: 331 - protein, 8 aa, Homo Sapien
RSSIGSNT

SEQ ID NO: 332 - protein, 11 aa, Homo Sapien
ASWDDSLNDYV

SEQ ID NO: 333 - protein, 11 aa, Homo Sapien
AAWDDSLNAVV

SEQ ID NO: 334 - protein, 6 aa, Homo Sapien
NIGSKS

SEQ ID NO: 335 - protein, 11 aa, Homo Sapien
AAWDDSLNGLA

SEQ ID NO: 336 - protein, 11 aa, Homo Sapien
AAWDDSVGVLL

SEQ ID NO: 337 - protein, 8 aa, Homo Sapien
DSNIGRNT

SEQ ID NO: 338 - protein, 11 aa, Homo Sapien
AAWDDSLNAYF

SEQ ID NO: 339 - protein, 12 aa, Homo Sapien
QSFDNRLSDFNV

SEQ ID NO: 340 - protein, 114 aa, Homo Sapien; identical to SEQ ID NO: 3

SEQ ID NO: 341 - protein, 113 aa, Homo Sapien
EVQLVQSGPEVKKPGTSVKVSCKASGFTFTNSAVQWVRQARGQRLEWIGWIVVGSGNTNYAQKFQERVTITRDMSTSTAYMELSSLKSEDTAVYYCVADTVYWGQGTLVTVSS

SEQ ID NO: 342 - protein, 114 aa, Homo Sapien; identical to SEQ ID NO: 73

SEQ ID NO: 343 - protein, 114 aa, Homo Sapien; identical to SEQ ID NO: 3

SEQ ID NO: 344 - protein, 114 aa, Homo Sapien
EVQLVQSGAEVKKPGASVKVSCKASGYNFTGYYMHWVRQAPGQGLEWMGWINPNSGGTNYAQKFQGRVTMTRDTSISTAYMELSRLRSDDTAVYYCATDSFDYWGKGTLVTVSS

SEQ ID NO: 345 - protein, 114 aa, Homo Sapien
QVQLVQSGAEVKKPGASVKVSCKASGYNFTGYYMHWVRQAPGQGLEWMGWINPNSGGTNYAQKFQGRVTMTRDTSISTAYMELSRLRSDDTAVYYCATDSFDYWGQGTLVTVSR

SEQ ID NO: 346 - protein, 113 aa, Homo Sapien
EVQLVQSGPEVKKPGTSVKVSCKASGFTFTSSAVQWVRQARGQRLEWIGWIVVGSGNTNYAQKFQERVTITRDMSTSTAYMELSSLRSEDTAVYYCVADTVYWGRGTTVTVSS

SEQ ID NO: 347 - protein, 114 aa, Homo Sapien
EVQLVQSGAEVKKPGASVKVSCKASGYNFTGYYMHWVRQAPGQGLEWMGWINPNSGGTNYAQKFQGRVTMTRDTSISTAYMELSRLRSDDTAVYYCATDSFDYWGRGTTVTVSS

SEQ ID NO: 348 - protein, 114 aa, Homo Sapien
QVQLVQSGAEVKKPGASVKVSCKASGYNFTGYYMHWVRQAPGQGPEWMGWINPNSGGTNYAQKFQGRVTMTRDTSISTAYMELSRLRSDDTAVYYCATDSFDYWGRGTMVTVSS

SEQ ID NO: 349 - protein, 113 aa, Homo Sapien
QVQLVQSGPEVKKPGTSVKVSCKASGFTFTSSAVQWVRQARGQRLEWIGWIVVGSGNTNYAQKFQERVTITRDMSTSTAYMELSSLRSEDTAVYYCVADTVYWGKGTLVTVSS

SEQ ID NO: 350 - protein, 113 aa, Homo Sapien
QVQLVQSGPEVKKPGTSVKVSCKASGFTFTSSAVQWVRQARGQRLEWIGWIVVGSGNTNYAQKFQERVTITRDMSTSTAYMELSSLRSEDTAVYYCVADTVYWGRGTLVTVSS

SEQ ID NO: 351 - protein, 115 aa, Homo Sapien
EVQLLESGGGLVQPGGSLRLSCAASGFTFSSYAMSWVRQAPGKGLEWVSAISGSGGSTYYADSVKGRFTISRDNSKNTLYLQMNSLRAEDTAVYYCATEPPFDIWGRGTMVTVSS

SEQ ID NO: 352 - protein, 114 aa, Homo Sapien; identical to SEQ ID NO: 347

SEQ ID NO: 353 - protein, 114 aa, Homo Sapien; identical to SEQ ID NO: 15

SEQ ID NO: 354 - protein, 114 aa, Homo Sapien; identical to SEQ ID NO: 347

SEQ ID NO: 355 - protein, 114 aa, Homo Sapien; identical to SEQ ID NO: 11

SEQ ID NO: 356 - protein, 114 aa, Homo Sapien
QVQLQESGAEVKKPGASVKVSCKASGYNFTGYYMHWVRQAPGQGLEWMGWINPNSGGTNYAQKFQGRVTMTRDTSISTAYMELSRLRSDDTAVYYCATDSFDYWGRGTTVTVSS

SEQ ID NO: 357 - protein, 114 aa, Homo Sapien
EVQLVQSGAEVKKPGASVKVSCKASGYNFTGYYMHWVRQAPGQGLEWMGWINPNSGGANYAQKFQGRVTMTRDTSISTAYMELSRLRSDDTAVYYCATDSFDYWGRGTLVTVSS

SEQ ID NO: 358 - protein, 114 aa, Homo Sapien; identical to SEQ ID NO: 15

SEQ ID NO: 359 - protein, 114 aa, Homo Sapien; identical to SEQ ID NO: 7

SEQ ID NO: 360 - protein, 114 aa, Homo Sapien; identical to SEQ ID NO: 75

SEQ ID NO: 361 - protein, 114 aa, Homo Sapien; identical to SEQ ID NO: 15

SEQ ID NO: 362 - protein, 128 aa, Homo Sapien
GVQLVQSGAEVKKPGASVKVSCKASGYTFTDYYVHWVRQAPGQGPEWMGWINPNNGGTKYAQKFQGRVTMTTDTSTSTAYMELRSLRSDDTALYYCARDLLPYYGDYRADKIDDFDIWGRGTLVTVSS

SEQ ID NO: 363 - protein, 114 aa, Homo Sapien
QVQLVQSGAEVKKPGASVKVSCKASGYNFTGYYIHWVRQAPGQGLEWMGWINPNSGGTNYAQKFQGRVIMTRDTSISTAYMELSRLRSDDTAVYYCATDSFDYWGRGTLVTVSS

SEQ ID NO: 364 - protein, 114 aa, Homo Sapien; identical to SEQ ID NO: 73

SEQ ID NO: 365 - protein, 114 aa, Homo Sapien; identical to SEQ ID NO: 9

SEQ ID NO: 366 - protein, 114 aa, Homo Sapien
EVQLVQSGAEVKKPGASVKVSCKASGYNFTGYYMHWVRQAPGQGLEWMGWINPNSGGTNYAQKFQGRVIMTRDTSISTAYMELSRLTSDDTAVYYCATDSFDYWGRGTTVTVSR

SEQ ID NO: 367 - protein, 114 aa, Homo Sapien; identical to SEQ ID NO: 9

SEQ ID NO: 368 - protein, 119 aa, Homo Sapien
EVQLVQSGAEVKKPGAPVKVSCKTSGYGFSNYYMHWVRQAPGQGLEWLGMINPSDGSQHFAQRFRDRVSFTSDTSTSAVYMELAGLRSDDTAVYYCAREKANSMYFDYWGQGTLVTVSS

SEQ ID NO: 369 - protein, 120 aa, Homo Sapien
QVQLQQSGPGLVKPSQTLSLTCAISGDSISSSSATWNWIRQSPSRGLEWLGRTYYRSKWYNDYAVSVKSRITIDPDTSKNQFSLQLNSVTPEDTAVYYCARQLGGRIEFWGQGTLVTVSS

SEQ ID NO: 370 - protein, 133 aa, Homo Sapien; identical to SEQ ID NO: 8

SEQ ID NO: 371 - protein, 114 aa, Homo Sapien; identical to SEQ ID NO: 3

SEQ ID NO: 372 - protein, 114 aa, Homo Sapien; identical to SEQ ID NO: 11

SEQ ID NO: 373 - protein, 114 aa, Homo Sapien
EVQLVQSGAEVKKPGASVKVSCKASGYNFTGYYMHWVRQAPGRGLEWMGWINPNSGGTNYAQKFQGRVTMTRDTSISTAYMELSRLRSDDTAVYYCATDSFDYWGQGTLVTVSS

SEQ ID NO: 374 - protein, 128 aa, Homo Sapien
EVQLVQSGPEVKKPGASVKVSCKASGYTFTDYFLNWVRQAPGQGLEWIGWINPNTGGTNYAQNFQGRVTVTRDASISTAYMELRSLTSADTAIYYCARGAYDYVWGSHRYVADAFDIWGQGTLVTVSS

SEQ ID NO: 375 - protein, 113 aa, Homo Sapien
QVQLVQSGPEVKKPGTSVKVSCKASGFTFTSSAVQWVRQARGQRLEWIGWIVVGSGNTNYAQKFQERVTITRDMSTSTAYMELSSLRSEDTAVYYCVADTVYWGQGTLVTVSS

SEQ ID NO: 376 - protein, 114 aa, Homo Sapien; identical to SEQ ID NO: 344

SEQ ID NO: 377 - protein, 114 aa, Homo Sapien; identical to SEQ ID NO: 363

SEQ ID NO: 378 - protein, 114 aa, Homo Sapien; identical to SEQ ID NO: 15

SEQ ID NO: 379 - protein, 123 aa, Homo Sapien
QVQLQESGGGLVQPGGSLSLSCATSGFTFGNYVMRWVRQAPGKGLEWVSTITEGGGDFIYYADSVKGRFAISRDNSKSTVYLHMNGLRVEDTAVYYCAKSGGDDNSNYNFEYWGQGTLVTVSS

SEQ ID NO: 380 - protein, 133 aa, Homo Sapien; identical to SEQ ID NO: 8

SEQ ID NO: 381 - protein, 128 aa, Homo Sapien
QVQLVQSGAEVRKPGASVKVSCKASGYTFTDYYLHWVRQAPGLGLEWMGWINPNTGGTDYGQKFQGRVTMTRDTSINTAYMELSSLRSDDTAVYYCARGAYDYVWGSHRYVADAFDIWGQGTTVTVSS

SEQ ID NO: 382 - protein, 128 aa, Homo Sapien
KVQLVQSGAEVKKPGASVKVSCKASGYTFTDFYIHWVRQAPGQGLEWMGWINSKSGDTHYAQKFQGRVTLTRDTSTDTAYMELSRLTSDDTAVYYCARGAYDYVWGSSRYVADAFDIWGRGTMVTVSS

SEQ ID NO: 383 - protein, 113 aa, Homo Sapien
EVQLVQSGPEVKKPGTSVKVSCKASGFTFTNSAVQWVRQARGQRLEWIGWIVVGSGNINYAQKFQERVTITRDMSTSTAYMELSSLKSEDTAVYYCVADTVYWGRGTMVTVSS

SEQ ID NO: 384 - protein, 114 aa, Homo Sapien
QVQLVQSGAEVKKPGASVKVSCKASGYNFTGYYMHWVRQAPGQGLEWMGWINPNSGGTNYAQKFQGRVTMTRETSISTAYMELSRLRSDDTAVYYCATDSFDYWGRGTMVTVSS

SEQ ID NO: 385 - protein, 114 aa, Homo Sapien
QVQLQQSGAEVKKPGASVKVSCKASGYNFTGYYMHWVRQAPGQGLEWMGWINPNSGGTNYAQKFQGRVTMTRDTSISTAYMELSRLRSDDTAVYYCATDSFDYWGQGTMVTVSS

SEQ ID NO: 386 - protein, 118 aa, Homo Sapien
QVQLQQSGAEVKTPGASVKVSCKASGYTFTDNYIHWVRQAPGQGLEWMGRINVNSGATNYARKFQGRVTMTGDTSISTAYMDLSRLKSDDTAVYYCARDFRYSGVDVWGQGTMVTVSS

SEQ ID NO: 387 - protein, 128 aa, Homo Sapien
QVQLVESGAEVKKPGASVKVSCKASGYTFTDHYIQWLRQAPGQGLEWMGWMNPKSGGTNYAQKFQGRVTLTRDTSISTAYMDLSGLRFDDTAIYFCASDPTIPPSPNYDYYYYAMDLWGKGTLVTVSS

SEQ ID NO: 388 - protein, 115 aa, Homo Sapien
EVQLVESGPGLVKPSETLSLTCTVSGGSMTSNFWSWIRQTPGKGLEWIGYVLYTGSTNSNPSLKSRVTMSVDTSKNQVSLTLSSVTAADTAIYYCARGNGWYLPWGRGTMVTVSS

SEQ ID NO: 389 - protein, 114 aa, Homo Sapien
EVQLVQSGAEVKKPGASVKVSCKASGYNFTGYYMHWVRQAPGQGLEWMGWINPNSGGTNYAQKFQGRVTMTRDTSISTAYMELSRLRSDDTAVYYCATDSFDYWGKGTMVTVSS

SEQ ID NO: 390 - protein, 114 aa, Homo Sapien; identical to SEQ ID NO: 385

SEQ ID NO: 391 - protein, 114 aa, Homo Sapien
QVQLVQSGAEVKKPGASVKVSCKASGYNFTGYYMHWVRQAPGQGLEWMGWINPNSGGTNYAQKFQGRVTMTRDTSISTAYMELSRLRSDDTAVYYCATDSFDYWGKGTLVTVSS

SEQ ID NO: 392 - protein, 114 aa, Homo Sapien
QVQLVQSGAEVKKPGAPVKVSCKASGYNFTGYYMHWVRQAPGQGLEWMGWINPNSGGTNYAQKFQGRVAMTRDTSISTAYMELSRLRSDDTAVYYCATDSFDYWGQGTMVTVSS

SEQ ID NO: 393 - protein, 125 aa, Homo Sapien
QMQLVQSGAEVKRPGASVNLSCKASGYSFSRYYIHWVRQAPGQGLELMGRINPGGGTTTYAQKFQGRVTLSRDTSTNTIFMELNGLTSEDTAMYYCARSNYDILAGYGPDAFDFWGQGTMVTVSS

SEQ ID NO: 394 - protein, 114 aa, Homo Sapien; identical to SEQ ID NO: 15

SEQ ID NO: 395 - protein, 115 aa, Homo Sapien
QVQLQQSGAEVKKPGAPLKVSCKTSGFTFTGYYIHWVRQAPGQGLEWMGRVDPYNGATNFAQKFQGRVTMTTDTSTSTTYMELMSLRSDDTAVYYCARGWELDSWGQGTLVTVSS

SEQ ID NO: 396 - protein, 114 aa, Homo Sapien; identical to SEQ ID NO: 15

SEQ ID NO: 397 - protein, 114 aa, Homo Sapien
QVQLVQSGAEVKKPGASVKVSCKASGYNFTGYYLHWVRQAPGQGLEWMGWIDPNSGGTDYAQQFQGRVTVTRDTSISTAYMELSGLRSDDTAVYYCASDSFDHWGQGTLVTVSS

SEQ ID NO: 398 - protein, 114 aa, Homo Sapien
QVQLQQSGAEVKKPGASVKVSCKASGYNFTGYYMHWVRQAPGQGLEWMGWINPNSGGTNYAQKFQGRVTMTRDTSISTAYMELSRLRPDDTAVYYCATDSFDYWGKGTMVTVSS

SEQ ID NO: 399 - protein, 114 aa, Homo Sapien
EVQLVQSGAEAKKPGASVKVSCKASGYNFTGYYMHWVRQAPGQGLEWMGWINPNSGGTNYAQKFQGRVTMTRDTSISTAYMELSRLRSDDTAVYYCATDSFDYWGQGTLVTVSS

SEQ ID NO: 400 - protein, 114 aa, Homo Sapien
QVQLVQSGAEVKKPGASVKVSCKASGYNFTGYYLHWVRQAPGQGLEWMGWINPNSGGTDYAQKFQGRVTVTRDTSISTAYMELGGLRSDDTAVYYCVSDSFDHWGRGTLVTVSS

SEQ ID NO: 401 - protein, 114 aa, Homo Sapien; identical to SEQ ID NO: 16

SEQ ID NO: 402 - protein, 114 aa, Homo Sapien; identical to SEQ ID NO: 9

SEQ ID NO: 403 - protein, 119 aa, Homo Sapien
QVQLVQSGADVKKPGASVKISCKASGYTFTKYYMHWVRQAPGQGLEWMGIINPTNGYTSYAQKFQGRVTMTSDTSASTVSMELSSLRSEDTAVYYCTRSYSNYDSFDIWGRGTMVTVSS

SEQ ID NO: 404 - protein, 122 aa, Homo Sapien
QVQLQQSGPEVKKPGASVKISCKTSGYTFSSFGISWVRQAPGQGPEWMGWVSPYSGDTDYAQKFRGRVTMTIDSSTDTAYVEMRSLRSDDTAIYYCANSPISDGSSSSYDNWGKGTLVTVSS

SEQ ID NO: 405 - protein, 122 aa, Homo Sapien
QVQLVQSGAEVKEPGSSVRVSCKSSGGTFSNYAISWVRQAPGQGLEWMGGIIPGFGKTNYAQKFQGRVTITADASTSTTYMELRTLRSGDTAVYYCARDRGPDIGVAHFDSWGKGTMVTVSS

SEQ ID NO: 406 - protein, 113 aa, Homo Sapien; identical to SEQ ID NO: 375

SEQ ID NO: 407 - protein, 114 aa, Homo Sapien; identical to SEQ ID NO: 6

SEQ ID NO: 408 - protein, 114 aa, Homo Sapien
QVQLQQSGAEVKKPGASVKVSCKASGYNFTGYYMHWVRQAPGQGLEWMGWINPNSGGTNYAQKFQGRVTMTRDTSISTAYMELSRLRSDDTAVYYCATDSFDYWGRGTMVTVSS

SEQ ID NO: 409 - protein, 114 aa, Homo Sapien
EVQLVESGAEVKKPGASVKVSCKASGYNFTGYYIHWVRQAPGQGLEWMGWINPNSGGTNYAQKFQGRVIMTRDTSISTAYMELSRLRSDDTAVYYCATDSFDYWGKGTMVTVSS

SEQ ID NO: 410 - protein, 127 aa, Homo Sapien
EVQLVQSGAEVKKPGASVKVSCKTSGYTFNDYYHHWVRQAPGQGLEWMGWINPHTGVANYAEKYKGRLAMTGDTSISTIYMDLSSLISDDTAIYFCARERSEWRNTVSSPSEYFHHWGKGTLVTVSS

SEQ ID NO: 411 - protein, 114 aa, Homo Sapien
EVQLVQSGAEVKKPGASVKVSCKASGYNFTGYYMHWVRQAPGQGLEWMGWINPNSGGTNYAQKFQGRVTMTRDTSISTAYMELSRLRSDDSAVYYCATDSFDYWGRGTLVTVSS

SEQ ID NO: 412 - protein, 114 aa, Homo Sapien; identical to SEQ ID NO: 73

SEQ ID NO: 413 - protein, 126 aa, Homo Sapien
QVQLQESGAEVKKPGASVKVSCRASGYTFTTNSLHWVRQAPGQGLDWMGVINPRDGSATVAQKFQGRITMTSDTSTSTVFLALSSLTSDDTGVYFCARDGLDYRDTSRILAPTDVWGRGTLVTVSS

SEQ ID NO: 414 - protein, 116 aa, Homo Sapien
QVQLVQSGAEVKKPGTTVKISCKVSGYKFTDYYIHWVRQAPGKGLEWMGFVDPTDDETRFAEKFQGRLTMTADTSRDTASMELSSLRSEDTAVYYCIRGIAALADWGRGTMVTVSS

SEQ ID NO: 415 - protein, 114 aa, Homo Sapien
QVQLQQSGAEVKKPGASVKVSCKASGYNFTGYYMHWVRQAPGQGLEWMGWINPNSGGTNYAQNFQGRVTMTRDTSISTAYMELSRLRSDDTAVYYCATDSFDYWGRGTMVTVSS

SEQ ID NO: 416 - protein, 124 aa, Homo Sapien
QVQLQQSGAEVKKPGASVKVSCKASGYIFGTYAIHWVRQAPGQSLEWMGWINAGTGNTKYSQKFQGRVTITMDTSATTAYMELSSLRSGDTAVYYCTRGDYYDSRGYYNRFDYWGRGTLVTVSS

SEQ ID NO: 417 - protein, 114 aa, Homo Sapien
QVQLVQSGAEVEKPGASVKVSCKASGYNFTGYYMHWVRQAPGQGLEWMGWINPNSGGTNYAQKFQGRVTMTRDTSISTAYMELSRLRSDDTAVYYCATDSFDYWGRGTLVTVSS

SEQ ID NO: 418 - protein, 114 aa, Homo Sapien
QVQLVQSGAEVKRPGASVKVSCKASGYNFTGYYMHWVRQAPGQGLEWMGWINPNSGGTNYAQKFQGRVTMTRDTSISTAYMELSRLRSDDTAVYYCATDSFDYWGKGTLVTVSS

SEQ ID NO: 419 - protein, 113 aa, Homo Sapien
QVQLVQSGAEVKKPGASVKVSCKASGYNFTGYYMHWVRQAPGQGLEWMGWINPNSGGTNYAQKFGRVTMTRDTSISTAYMELSRLRSDDTAVYYCATDSFDYWGKGTLVTVSS

SEQ ID NO: 420 - protein, 114 aa, Homo Sapien; identical to SEQ ID NO: 6

SEQ ID NO: 421 - protein, 121 aa, Homo Sapien
QVQLVQSGAEVKKPGASVKVSCKAPGYSFTDYYLHWVRQAPGIGLEWVGWINPNNGGTNYAQKFRGRVTMTRDTAINTAYMDMRWLRSDDTAVYYCATDGPPGTGNAFDIWGRGTLVTVSS

SEQ ID NO: 422 - protein, 114 aa, Homo Sapien; identical to SEQ ID NO: 11

SEQ ID NO: 423 - protein, 114 aa, Homo Sapien
EVQLVESGAEVKKPGASVKVSCKASGYNFTGYYMHWVRQAPGQGLEWMGWINPNSGGTNYAQKFQGRVIMTRDTSISTAYMELSRLTSDDTAVYYCATDSFDYWGRGTLVTVSS

SEQ ID NO: 424 - protein, 114 aa, Homo Sapien; identical to SEQ ID NO: 15

SEQ ID NO: 425 - protein, 114 aa, Homo Sapien; identical to SEQ ID NO: 3

SEQ ID NO: 426 - protein, 114 aa, Homo Sapien; identical to SEQ ID NO: 15

SEQ ID NO: 427 - protein, 113 aa, Homo Sapien
QVQLVQSGPEVKKPGTSVKVSCKASGFTFTSSAVQWVRQARGQRLEWIGWIVVGSGNTNYAQKFQERVTITRDMSTSTAYMELSSLRSEDTAVYYCVADTVYWGRGTMVTVSS

SEQ ID NO: 428 - protein, 114 aa, Homo Sapien; identical to SEQ ID NO: 15

SEQ ID NO: 429 - protein, 128 aa, Homo Sapien
QVQLVQSGPEVKKPGASVKVSCKAAGYTFPDFYMHWVRQAPGKGPEWVGWINSNSGSTRLAERLEGRVTLTRDTSISTAYMELTSLTSDDTAVYYCARGAYDYVWGTSRYVADAFDIWGQGTLVTVSP

SEQ ID NO: 430 - protein, 114 aa, Homo Sapien; identical to SEQ ID NO: 11

SEQ ID NO: 431 - protein, 120 aa, Homo Sapien
EVQLVQSGAEVKKPGASVKVSCKASGYTFTGYYIHWVRQAPGQGLEWMGWISPNSGVTNYAQRFQGRVTMSRDTSITTAYMELNRLGSDDTAVYYCAREGREDGVLFDYWGRGTLVTVSS

SEQ ID NO: 432 - protein, 114 aa, Homo Sapien
QVQLQQSGAEVKKPGASVKVSCKASGYNFTGYYMHWVRQAPGQGLEWMGWINPNSGGTNYAQKFQGRVTMTRDTSISTAYMELSRLGSDDTAVYYCATDSFDYWGRGTLVTVSS

SEQ ID NO: 433 - protein, 114 aa, Homo Sapien; identical to SEQ ID NO: 14

SEQ ID NO: 434 - protein, 127 aa, Homo Sapien
EVQLVQSGAEVKKPGASVKVSCKASGYSFRSYGIVWVRQAPGQGLEWMGWISAYNGNTNYAQKLQGRVTMTTDTSTSTAYMELRSLRSDDTAVYYCVRGDRHYDILTGYSPVWFDPWGKGTTVTVSS

SEQ ID NO: 435 - protein, 118 aa, Homo Sapien
EVQLVQSGAEVKKPGASVKLSCKTSGHTFTNYAFHWLRQAPGQRPEWLGWINADNGNTKYSQSFQDRVTITRDISANTAYMEMSRLKSEDTAYYYCARDPWSGVLDHWGKGTLVTVSS

SEQ ID NO: 436 - protein, 110 aa, Homo Sapien
QSVVTQPPSASGTPGQRVTISCSGSSSNIGSNTVNWYQQLPGTAPKLLIYSNNQRPSGVPDRFSGSKSGTSASLAISGLQSEDEADYYCAAWDDSLNGYVFGTGTKLTVL

SEQ ID NO: 437 - protein, 110 aa, Homo Sapien
QSVLTQPPSASGTPGQRVTISCSGSSSNIGSNTVNWYQQLPGTAPKLLIYSNNQRPSGVPDRFSGSKSGTSASLAISGLQSEDEADYYCAAWDDSLNGWVFGGGTKLTVL

SEQ ID NO: 438 - protein, 110 aa, Homo Sapien
QAVLTQPSSVSGTPGQRVTMSCSGGRSNIGSNAVNWYQQFPGTAPKLLMYNTNQRPSGVPGRFSGSKSGASASLAISGLQSDDEADYYCSSWDDSLNGLEFGGGTKLTVL

SEQ ID NO: 439 - protein, 110 aa, Homo Sapien
QSVVTQPPSASGTPGQRVTISCSGSSSNIGSNTVNWYQQLPGTALKLLIYSNNQRPSGVPDRFSGSKSGTSASLAISGLQSEDEADYYCAAWDDSLNGYVFGTGTKLTVL

SEQ ID NO: 440 - protein, 111 aa, Homo Sapien
QAVLTQPSSVSGAPGQRVTISCTGSSSNIGAGYDVHWYRQLPGTAPKLLLYGNDNRPSGVPDRFSGSKSGASASLAITGLRADDEADYYCQSYDSSLSGSVFGGGTKVTVL

SEQ ID NO: 441 - protein, 111 aa, Homo Sapien
QAVLTQPSSVSGAPGQRVTISCTGSSSNIGAGYDVHWYQQLPGTAPKLLIYGNSNRPSGVPDRFSGSKSGTSASLAITGLQAEDEADYYCQSYDSSLSGSVFGGGTKVTVL

SEQ ID NO: 442 - protein, 110 aa, Homo Sapien
QSVLTQPPSASGTPGQGVTISCSGSSSNIGRNSVNWYQQLPGTAPKLLIYGDNQRPSGVPDRFSGSKPGTSASLAISGLQSDDEAHYYCAAWDDSLNGWVFGGGTKVTVL

SEQ ID NO: 443 - protein, 111 aa, Homo Sapien
QAVLTQPSSVSGAPGQRVTISCTGSRSNIGAGYDVHWYQQLPGTAPKLLIYGNSNRPSGVPDRFSGSKSGTSASLAITGLQAEDEADYYCQSYDSSLSGSVFGGGTKLTVL

SEQ ID NO: 444 - protein, 110 aa, Homo Sapien
QSVLTQPPSASGTPGQRVTISCSGSSSNIGSNTVTWYQQVPGTAPKVLIYTNIQRPSGVPDRFSGSKSGTSASLAISGLQSEDESDYFCAAWDDSLNGVVFGGGTKLTVL

SEQ ID NO: 445 - protein, 110 aa, Homo Sapien
SYELTQPPSASGTPGQRVTISCSGSSSNIGSNPVNWYQHLPGTAPKLLIYSDSQRPSGVPDRFSGSKSGTSASLAISGLQSEDEADYYCATWDDSLSGWVFGGGTKLTVL

SEQ ID NO: 446 - protein, 110 aa, Homo Sapien
HVILTQPPSASGTPGQRVTISCSGGGSNIGSNTVNWYQHLPGTAPKLLIYNNDQRPSGVPDRFSGSKSGTSASLAISGLQSEDEADYYCAAWDDSLNGWLFGGGTKLTVL

SEQ ID NO: 447 - protein, 110 aa, Homo Sapien
QSVLTQPPSVSGTPGQRVTISCSGSSSNIGNDVVNWYQQLPGTAPKLLIYNDYQRPSGVSDRFSGSKSGTSAYLAISGLQSEDEADYHCAVWDDSLDGWVFGGGTKLTVL

SEQ ID NO: 448 - protein, 110 aa, Homo Sapien
QPVLTQPPSASGTPGQRVTISCSGSSSNIASNSVYWYQQLPGTAPKLLIYRNNQRPSGVPDRFSGSQSGASASLAISGLRSEDEADYYCAAWDDNLYGVVFGGGTKLTVL

SEQ ID NO: 449 - protein, 111 aa, Homo Sapien
LPVLTQPPSASGTPGQRVTISCSGSSSNIGNNYVYWYQQLPGTAPKLLIYRNNQRPSGVPDRFSASKSGTSASLVISGIRSEDEAEYYCGGWDDSLSGQVVFGGGTKLTVL

SEQ ID NO: 450 - protein, 110 aa, Homo Sapien
QAVLTQPSSASGTPGQRVTISCSGSSSNIGSNTVNWYQQLPGTAPKLLIYATNQRPSGVPDRFSGSESGTSASLAIRGLQSEDEADYYCAAWDDSLNGKVFGGGTKVTVL

SEQ ID NO: 451 - protein, 110 aa, Homo Sapien
QSVLTQPPSVSGAPGQRVTISCSGSTSNIGGNPVTWYQQFPGTAPKLLVYRDNQRPSGVADRFSGSRSGTSASLAISGLQSEDEADFYCASWDDSLGGVVFGGGTKLTVL

SEQ ID NO: 452 - protein, 110 aa, Homo Sapien
QAVLTQPSSESGTPGQRVTISCSGTTSNIGDNTVTWYQQLPGTAPKLLIYSNTQRPSGVPARFSGSKSGTSASLAISGLQSGDEADYYCAAWDDSRNGYVFGTGTKLTVL

SEQ ID NO: 453 - protein, 110 aa, Homo Sapien
QAVLTQPSSASGTPGQRVTISCSGSSSNIGTNYVYWYQHLPGMAPKLLLYSNNQRPSGVPDRFSGSKSGPSASLAISGLRSEDEADYYCAAWDDSLSGLVFGGGTKLTVL

SEQ ID NO: 454 - protein, 110 aa, Homo Sapien; identical to SEQ ID NO: 30

SEQ ID NO: 455 - protein, 111 aa, Homo Sapien
QAVLTQPSSVSGAPGQRVTISCTGSSSNIGSPYDVNWYQQFPGTAPKLLIYGNINRPSGVPDRFSGSKSGTSASLAITGLQAEDEADYYCQTYDSTLNGAVFGGGTKLTVL

SEQ ID NO: 456 - protein, 110 aa, Homo Sapien
QSVLTQPPSASGTPGQRVTISCSGSSSNIGGNYVYWYQQLPGTAPKLLIYRSNQRPSGVPDRFSGSKSGTSASLAISGLRSEDEADYYCAAWDDSLHGVIFGGGTKLTVL

SEQ ID NO: 457 - protein, 110 aa, Homo Sapien
QAVLTQPSSASGTPGQRVTISCPGSSSNIGSNTVNWYQQLPGTAPKLLIYTNNQRPSGVPDRFSASKSGTSASLAISGLQSEDEADYYCAAWDDSLNGYVFGTGTKLTVL

SEQ ID NO: 458 - protein, 110 aa, Homo Sapien; identical to SEQ ID NO: 78

SEQ ID NO: 459 - protein, 110 aa, Homo Sapien
QAVLTQPSSASGTAGQRVTISCSGSNSNIGSNTVNWYQQLPGTTPKLLIYSNNERPSGVPDRFSGSKSGTSASLAISGLQSDDEADYYCAAWDDSLNGYVFGTGTKVTVL

SEQ ID NO: 460 - protein, 110 aa, Homo Sapien
QSVLTQPPSASGTPGQRVSISCSGSSSNIGSNYVYWYQQLPGTAPKVLVYRNNQRPSGVSDRFSGSKYGTSASLAISGLRSEDEADYYCGSWDDSLSGVVFGGGTKVTVL

SEQ ID NO: 461 - protein, 110 aa, Homo Sapien
QSVLTQPPSASGTPGQRVTISCSGSSSNIGSNYVYWYQQLPGTAPKLLIYRNNQRPSGVPDRFSGSKSGTSASLAISGLRSEDEADYYCAAWDDSLSGVVFGGGTKVTVL

SEQ ID NO: 462 - protein, 110 aa, Homo Sapien
QSVVTQPPSASGTPGQRVTISCSGSSSNIGSNYVYWYQQLPGTAPKLLIYRNNQRPSGVPDRFSGSKSGTSASLAISGLRSEDEADYYCAAWDDSLSGVVFGGGTKLTVL

SEQ ID NO: 463 - protein, 110 aa, Homo Sapien; identical to SEQ ID NO: 29

SEQ ID NO: 464 - protein, 110 aa, Homo Sapien
QSVVTQPPSLSAAPGQRVTISCSGSHSNIGNFYVSWYQQVPGAAPKLLIYDNNERPSGIPDRFSGSKSGTSATLDITGLQTGDEADYYCSTWDRSLSASVFGSGTKLTVL

SEQ ID NO: 465 - protein, 110 aa, Homo Sapien
QSVLTQPPSASGSPGRSVTISCTGTSRDVGAYNYVSWYQQHPGEAPKLLISEVTKRPSGVPARFSASKSGNTASLTISGLQAEDEGDYYCSSYAGSDSWVFGGGTKLTVL

SEQ ID NO: 466 - protein, 110 aa, Homo Sapien
NFMLTQPHSVSESPGKTVTISCTRSSGSIGSSYVQWYQQRPGTSPVTIIYEDSQRPSGVPDRFSGSIDNSANSASLTISGLKTEDEADYYCQSYDANNRVFGGGTKLTVL

SEQ ID NO: 467 - protein, 110 aa, Homo Sapien
QSVLTQPPSATGTPGQTVSISCSGGNSNIGSNYVSWYQQLPGTAPKLLIYSNNQRPSGVPDRFSGSKSGTSASLAISGLQSEDEADYYCAAWDDSLNGHIFGTGTKLTVL

SEQ ID NO: 468 - protein, 110 aa, Homo Sapien
QSVLTQPPSASGTPGQRVTISCSGSSSNIGANYVYWYQQLPGTAPKLLIYKNDQRPSGVPDRFSGSKSGTSASLAISGLRSEDEADYYCAAWDDSLSGLVFGGGTKVTVL

SEQ ID NO: 469 - protein, 110 aa, Homo Sapien
QSVLTQPPSASGTPGQRVTISCSGSNSNIGSNTVNWYQQLPGTAPKVLIYGNLQRPSGVPDRFSGSKSGTSASLAISGLQSEDEADYYCATWDDSLNGFVFGTGTKLTVL

SEQ ID NO: 470 - protein, 110 aa, Homo Sapien; identical to SEQ ID NO: 78

SEQ ID NO: 471 - protein, 110 aa, Homo Sapien
QSVLTQPPSVSEAPRQRVTISCSGSSSNIGNNAVNWYQQLPGEAPKLLIYYDDLLPSGVSDRFSGSKSGSSASLAISGLQAEDEADYYCATWDDSLNAWVFGGGTKVTVL

SEQ ID NO: 472 - protein, 110 aa, Homo Sapien
LPVLTQPPSVSEAPRQRVTISCSGSSFNIGNNAVNWYQQLPGKAPKLLIYYDDLLPSGVSDRFSGSKSGTSASLAISGLQSEDEADYYCAAWDDSLNAVVFGGGTKVTVL

SEQ ID NO: 473 - protein, 110 aa, Homo Sapien; identical to SEQ ID NO: 82

SEQ ID NO: 474 - protein, 110 aa, Homo Sapien
QSVVTQPPSASGTPGQRVTISCSGSSSNIGSNTVNWYQQLPGTAPKLLIYSNNQRPSGVPDRFSGSKSGTSASLAISGLQSEDEADYYCAAWDDSLNGGVFGGGTKLTVL

SEQ ID NO: 475 - protein, 111 aa, Homo Sapien
QAVLTQPSSVSGAPGQRVIISCTGTSSNTGAGYYVNWYQQLPGAAPKVLIFGNDNRPSGVPDRFSGAKSGTSASLAITGLQAEDEADYYCQSYDRSLSGWVFGGGTKLTVL

SEQ ID NO: 476 - protein, 108 aa, Homo Sapien
SSELTQDPAVSVALGQTVRITCQGDSLRSNYPSWYQQKPGQAPLLVIYSENRRPSGIPDRFSASRSGNTASLTITGAQAEDEADYYCHSRGSSGNHKVFGGGTQLTVL

SEQ ID NO: 477 - protein, 107 aa, Homo Sapien
DIVMTQSPSTLSASVGDRVTITCRASQGISSWLAWYQQKPGRAPKVLIYKASTLESGVPSRFSGSGSGTDFTLTISSLQPEDFATYYCQQSYSTPWTFGQGTKLEIK

SEQ ID NO: 478 - protein, 107 aa, Homo Sapien; identical to SEQ ID NO: 477

SEQ ID NO: 479 - protein, 110 aa, Homo Sapien
QPVLTQPPSASGTPGQRVTISCSGSSSNLGINTVNWYQQVPGTAPKLLIYSDHQRPSGVPDRFSGSKSATSASLAISGLQSEDEADYYCAAWDDSLNGWVFGGGTKLTVL

SEQ ID NO: 480 - protein, 110 aa, Homo Sapien
QSVLTQPPSASGTPGQRVTIPCSGSSSNIGSNYVYWYQQLPGTAPKLLIYRNNQRPSGVPDRFSGSKSGTSASLAISGLRSEDEADYYCAAWDDSLSGLVFGGGTKVTVL

SEQ ID NO: 481 - protein, 110 aa, Homo Sapien
SYVLTQPPSASGTPGQRVTVSCSGSSSSIGSNTVNWYQQLPGTAPKLLIYSNNQRPSGVPDRFSGSKSGTSASLAISGLQSEDEADYYCAAWDDSLNGLVFGGGTKLTVL

SEQ ID NO: 482 - protein, 110 aa, Homo Sapien
QSVLTQPPSVSVAPGQTATLSCVGDAIERKSVHWYQQRPGQAPVLVVHDDSDRPSGIPDRISGSNSGNTATLTITRVEVGDEADYFCQVWDTSSGHDAVVFGGGTKLTVL

SEQ ID NO: 483 - protein, 108 aa, Homo Sapien; identical to SEQ ID NO: 96

SEQ ID NO: 484 - protein, 110 aa, Homo Sapien
QSVLTQPPSVSGAPRQRVTISCSGSSSNIENNIVNWYQQLPGEAPKLLIYYDNLLPSGVSDRFSGSKSGTSASLAISGLQSGDEADYYCAAWDDSLKAVVFGGGTKLTVL

SEQ ID NO: 485 - protein, 110 aa, Homo Sapien
QPVLTQPPSASGTPGQRVTISCSGSYSNIGSNYVYWYQQFPGTAPKLLIYTNNQRPSGVPDRFSGSKSGSSASLAISGLRSEDEADYYCAAWDDSVGVLLFGGGTKVTVL

SEQ ID NO: 486 - protein, 110 aa, Homo Sapien
QSVLTQPPSASGTPGQRVTISCSGSTSNIGKNTVNWYQQLPATAPKLLIYSDNQRPSGVPDRFSGSKSGTSASLAISGLQSEDESDYYCAAWDDSLDGLVFGGGTKLTVL

SEQ ID NO: 487 - protein, 110 aa, Homo Sapien
QSVLTQPPSVSATPGQKVTISCSGSNSNIGNNYVSWYQQLPGTAPKLLIYDSDQRPAGIPDRFSGSKLGTSATLGITGLQTGDEADYYCATWDAGLSVLIFGGGTKLTVL

SEQ ID NO: 488 - protein, 110 aa, Homo Sapien
QPVLTQPPSASGTPGQRVAISCSGSSSNIGSNPVNWYQQLPGTAPKLLIYGDNQRPSGVPDRFSGSKSGTSASLAVSGLQSEDEADYFCAAWDDSLNGVVFGGGTKLTVL

SEQ ID NO: 489 - protein, 112 aa, Homo Sapien
QAVLTQPSSVSGAPGQRVTISCTGSSSNIGAGNDVHWYRQFPGTAPKLLIYGNNKRPSGVSDRFSGSKSGTSASLAITGLQVEDEADYYCQSYDSSLGGSDVFGGGTKLTVL

SEQ ID NO: 490 - protein, 110 aa, Homo Sapien
QSVLTQPPSASGTPGQRVTISCSGSSSNIGGNTVNWYQQLPGTAPKLLIYGTNQRPSGVPDRFSGSKSGTSASLAISGLQSEDEADYYCAAWDDFLNGKVFGGGTKLTVL

SEQ ID NO: 491 - protein, 110 aa, Homo Sapien; identical to SEQ ID NO: 86

SEQ ID NO: 492 - protein, 110 aa, Homo Sapien
SYVLTQPPSTSGAPGQRVTISCSGSSSNIGSNGVNWYHHLPGTAPKLLIYSNFHRPSGVPDRFSGSKSGTSATLAISGLQSEDEADYYCAAWDDSLNDYVFGVGTKVTVL

SEQ ID NO: 493 - protein, 110 aa, Homo Sapien
QSVLTQPPSASGTPGQRATISCSGSGSNIGRNAVNWFQQLPGAAPKLLIYSNIHRPSGVPDRISGSKSGTSATLAISGLQSEDEADYYCATWDDSLNDYVFGTGTKLTVL

SEQ ID NO: 494 - protein, 111 aa, Homo Sapien
QAVLTQPSSVSGAPGQRVTISCTGTGSNIGAGYDVHWYQQLPGTAPKLLIYANTNRPSGVPDRFSGSKSGTSASLAITGLQAEDEADYYCQSYDSSLSGSVFGGGTKVTVL

SEQ ID NO: 495 - protein, 110 aa, Homo Sapien
SYELTQPPSASGTPGQRVTISCSGTSSNIGINYVYWYQQLPRTAPKLLIYYNNQRPSGVPDRFSGSRSGTSASLAISGLRSEDEADYYCAAWDDSLSGLVFGTGTKLTVL

SEQ ID NO: 496 - protein, 110 aa, Homo Sapien
QSVLTQPPSASGTPGQRVTISCSGSSSNIGSNPVNWYQQLPGSAPKLLVYSDDQRPSGVPDRFSGSKSGASASLAISGLQSEDESDYYCAAWDDSQNAVVFGGGTKVTVL

SEQ ID NO: 497 - protein, 110 aa, Homo Sapien
LPVLTQPPSASGTPGQRVIISCSGSSSNIGSNYVYWYQQLPGTAPKLLIYRNNQRPSGVPDRFSGSKSGTSASLAISGLRSEDEADYHCAAWDDSLSGVVFGGGTKLTVL

SEQ ID NO: 498 - protein, 110 aa, Homo Sapien
SYELTQPPSASGTPGQRVTISCSGSGSNIGKNTVNWYQQLPGAAPKLLIYSNNERPSGVPGRFSGSKSGTSASLAISGLQSEDETDYYCAAWDDSLNDMVFGGGTKVTVL

SEQ ID NO: 499 - protein, 112 aa, Homo Sapien
QAVLTQPSSVSGAPGQRITISCTGTSSNIGAGYDVEWYQHLPGTAPKLLIYRNSNRPSGVPDRFSASKSGTSASLVITGLQAEDEADYYCQSYDTRLSDSVIFGGGTKLTVL

SEQ ID NO: 500 - protein, 108 aa, Homo Sapien
SYELTQPPSVSVAPGQTARITCGGENIGTKSVHWYQQKSGQAPVLVIYEDKKRPSGIPDRFSGSSSGTMATLTITGAQVDDEADYYCYSADNTGDQRMFGGGTKLTVL

SEQ ID NO: 501 - protein, 110 aa, Homo Sapien
QAVLTQPSSASGTPGQRVIISCSGSSSNIGKYIVNWYQQLPGAAPKLLIYTYNERPSGVPARFSGSTSGTSASLAITGLQSEDEADYYCASWDDSLNVVVFGGGTKLTVL

SEQ ID NO: 502 - protein, 111 aa, Homo Sapien
QSVVTQPPSASGTPGQRVTISCSGSSSNIGSNTVNWYQQLPGMAPKLLIYSNNQRPPGVPDRFSGSKSGTSASLAISGLQSEDEADYYCAAWDDSLNGNWVFGGGTKLTVL

SEQ ID NO: 503 - protein, 110 aa, Homo Sapien
QSVLTQPPSASGTPGQRVTISCSGSSSNIGSNYVYWYQKFPGTAPKLLIYTNNQRPSGVPDRFSGSKSGTSASLAISGLRSEDEADYYCAAWDDSLSGVVFGGGTKVTVL

SEQ ID NO: 504 - protein, 111 aa, Homo Sapien
QSVVTQPPSVSGAPGQRVTISCTGSSSNIGAGYDVHWYQQLPGTAPKLLIYGNSNRPSGVPDRFSGSKSGTSASLAITGLQAEDEADYYCQSYDSSLSGSVFGGGTKLTVL

SEQ ID NO: 505 - protein, 110 aa, Homo Sapien
QSVLTQPPSASGTPGQRVAISCSGSHSNIRSNDVYWYQQFPGTAPKLLIYSNDQRPSGVSDRFAGSKSGTSASLAISGLRSEDESDYYCATWDDSLSGVVFGGGTKLTVL

SEQ ID NO: 506 - protein, 111 aa, Homo Sapien
QSVLTQPPSASGTPGQRVTISCSGSFSNIGSNNVYWYQQLAGTAPKLLIYRNNERPSGVPDRFSGSKSGTSASLAISGLRSEDEADYYCAVRDDSLSGHYVFGSGTKVTVL

SEQ ID NO: 507 - protein, 110 aa, Homo Sapien
QSVLTQPPSASGTPGQRVTISCSGSSSNIGSNSVYWYQQFPGTAPKLLIYRNNQRPSGVPDRFSGSKSDTSASLAISGLRSEDEADYYCATWDDSLSGVVFGGGTKLTVL

SEQ ID NO: 508 - protein, 110 aa, Homo Sapien
QAVLTQPSSVSGTPGQRVTMSCSGGRSNIGSNAVNWYQQFPGTAPKLLMYNTNQRPSGVPGRFSGSKSGASASLAISGLQSDDEADYYCSSWDDSLNGLEFGGGTKLEIK

SEQ ID NO: 509 - protein, 108 aa, Homo Sapien
QSVLTQPPSVSVSPGQTASITCSGDKLGDKYTFWYQQKPGQSPVLIIYQDTKRPSGIPERFSGSNSGNTATLTISGTQAMDEADYYCQAWDSNTDHVIFGGGTKLTVL

SEQ ID NO: 510 - protein, 115 aa, Homo Sapien
QAVLTQPSSLSASPGASASLTCTLRSDINLETSRIYWFQQKPGSPPRYLLRYQSDSDNNLDSGVPSRFSGSKDASANAGILLISGVQSEDEADYHCMIWHSGGSVFGGGTKVTVL

SEQ ID NO: 511 - protein, 110 aa, Homo Sapien
QSVLTQPPSASGTPGQRVTISCSGNRSNIGSNTVNWYQQLPGTAPKLLIYSNDQRPSGVPDRFSGSKSGTSASLTISGLQSDDEADFYCAAWDDNLNGYVFGSGTKVTVL

SEQ ID NO: 512 - protein, 110 aa, Homo Sapien
QSVVTQPPSASGTPGQRVTISCSGSSSNIGKNNVYWYQQLPGAAPKLLIYRNHERASGVPDRFSGSKSGTSASLAISGLQSEDEADYYCAARDDSLNGYVFGTGTKVTVL

SEQ ID NO: 513 - protein, 110 aa, Homo Sapien
QSVLTQPPSSSGTPGQRVTISCSGSSSNIGSNSVNWYQQLPGAAPKLLIYSDNQRPSGVPDRFSASKSYTSASLAISGLQSGDEADYFCATWDDSLTGLVFGGGTKLTVL

SEQ ID NO: 514 - protein, 110 aa, Homo Sapien
QAVLTQPSSASGTPGQRVTISCSGSYSNIGSNYVYWYQQLPGTAPKLLIYTNNQRPSGVPDRFSGSKSGTSASLVISGLRSDDEGDYYCAAWDDSVSVLLFGGGTKLTVL

SEQ ID NO: 515 - protein, 110 aa, Homo Sapien
QSVLTQPPSASGTPGQRVTISCSGSSSNIGTYTVNWYQQHPGTAPKLLIYSNDQRPSGVPDRFSGSRSGTSASLAISGLRSEDEADYYCAAWDDSLHGYVFRTGTKLTVL

SEQ ID NO: 516 - protein, 110 aa, Homo Sapien; identical to SEQ ID NO: 457

SEQ ID NO: 517 - protein, 108 aa, Homo Sapien; identical to SEQ ID NO: 96

SEQ ID NO: 518 - protein, 110 aa, Homo Sapien
QAVLTQPSSVSGTPGQTVTISCSGSNSNIGNNYVYWYQQLPGSAPKVVIYRNHQRPSGVPDRFSGSKSGTAASLAISGLRSEDEADYYCASWDDSLSGLVFGGGTKLTVL

SEQ ID NO: 519 - protein, 110 aa, Homo Sapien
QPVLTQPPSASGTPGQRVTISCSGSSSNIGSNTVNWYQQLPGTAPKLLIYSNNQRPSGVPDRFSGSKSGTSASLAISGLQSEDEADYYCAAWDDSLNDVVFGGGTKLTVL

SEQ ID NO: 520 - protein, 110 aa, Homo Sapien
QSVLTQPPSASGTPGQRVTLSCSGSSSNIGSNTVNWYQQLPGTAPKVLIYSDNQRPSGVPDRFSGSKSGTSASLAISGLQSDDEAVYYCAGWDDSLNAYLFGTGTKVTVL

SEQ ID NO: 521 - protein, 110 aa, Homo Sapien
QAVLTQPSSASGTPGQRVTISCSGSSSNIGSYTVNWYQQVPGTAPKLLIYSNNQRPSGVPERFSGSKSGTSASLAISGLQSEDEADYYCAAWDDSLSDVLFGGGTKLTVL

SEQ ID NO: 522 - protein, 110 aa, Homo Sapien
LPVLTQPPSASGTPGQRVTISCSGSSSNIGSNSVNWYQQLPGTAPKLLIYSNNQRPSGVPDRFSGSQSGTSASLAISGLRSEDEADYYCAAWDDSLNNLVFGGGTKLTVL

SEQ ID NO: 523 - protein, 110 aa, Homo Sapien
QSVLTQPPSASATPGQTVTISCSGSTSNIGNNNVNWYQQVPGTAPKLLMYSNNQRPSGVPDRFSGSRSGTSASLAITALQSEDEADYYCATWDDSLSAWVFGGGTKVTVL

SEQ ID NO: 524 - protein, 110 aa, Homo Sapien
LPVLTQPPSASGTPGQRVTISCSGSSSNIGSNPVNWYQQLPGSAPKLLVYSDDQRPSGVPDRFSGSKSGASASLAISGLQSEDESDYYCAAWDDSLNAVVFGGGTKVTVL

SEQ ID NO: 525 - protein, 107 aa, Homo Sapien; identical to SEQ ID NO: 477

SEQ ID NO: 526 - protein, 110 aa, Homo Sapien; identical to SEQ ID NO: 34

SEQ ID NO: 527 - protein, 112 aa, Homo Sapien
QAVLTQPSSVSGAPGQTVTISCAGSSSNLGAGYDAHWYQHLPGAVPRLLIYNNSKRPSGVPDRFSASKSGSSASLAITGLQPEDEADYYCQTYDTRLSGSMLFGGGTKVTVL

SEQ ID NO: 528 - protein, 110 aa, Homo Sapien
QSVLTQPPSASGTPGQGVTISCSGSSSNIGSNTVNWYQQLPGTAPKLLIYSNNQRPSGVPDRFSGSKSGTSASLAISGLQSEDEADYYCAAWDDSLNGKVFGTGTKVTVL

SEQ ID NO: 529 - protein, 110 aa, Homo Sapien
QAVLTQPSSASGTPGQRVTISCSGSSSNIGSYTVNWYQQVPGTAPKLLIYSNNQRPSGVPERFSGSKSGTSASLAISGLQSEDEADYYCAAWDDSLSDVLFGGGTKVTVL

SEQ ID NO: 530 - protein, 107 aa, Homo Sapien
DIQLTQSPSSVSASIGDTVTITCRASQNINKWLAWYQQKPGKAPYLLISTASNLQSGVPSRFSGTGSGTAFTLTISRVQPEDFANYYCQQAFSFPITFGQGTRLEIK

SEQ ID NO: 531 - protein, 108 aa, Homo Sapien
SSELTQDPAVSVALGQTVRITCQGDSLRSYYASWYQQKPGQAPVLVIYGKNNRPSGIPDRFSGSSSGNTASLTITGAQAEDEADYYCNSRDSSGNHVVFGGGTKLTVL

SEQ ID NO: 532 - DNA, 342 bp, Homo Sapien
gaggtgcagctggtgcagtctggggctgaggtgaagaagcctggggcctcagtgaaggtctcctgcaaggcttctggatacaacttcaccggctactatatgcactgggtgcgacaggcccctggacaaggacttgagtggatgggatggatcaaccctaacagtggtggcacaaactatgcacagaagtttcagggcagggtcaccatgaccagggacacgtccatcagcacagcctacatggagctgagcaggctgagatctgacgacacggccgtgtattactgtgcgacagactcctttgactactggggccaggggacaatggtcaccgtctcgagt

SEQ ID NO: 533 - DNA, 339 bp, Homo Sapien
gaggtccagctggtgcagtctgggcctgaggtgaagaagcctgggacctcagtgaaggtctcctgcaaggcttctggattcacctttactaactctgctgtgcagtgggtgcgacaggctcgtggacaacgccttgagtggataggatggatcgtcgttggcagtggtaacacaaactacgcacagaagttccaggaaagagtcaccattaccagggacatgtccacaagcacagcctacatggagctgagcagcctgaaatccgaggacacggccgtgtattattgtgtggcagatacggtctactggggccagggcaccctggtcaccgtctcgagt

SEQ ID NO: 534 - DNA, 342 bp, Homo Sapien; identical to SEQ ID NO: 178

SEQ ID NO: 535 - DNA, 342 bp, Homo Sapien; identical to SEQ ID NO: 532

SEQ ID NO: 536 - DNA, 342 bp, Homo Sapien
gaggtgcagctggtgcagtctggggctgaggtgaagaagcctggggcctcagtgaaggtctcttgcaaggcttctggatacaacttcaccggctactatatgcactgggtgcgacaggcccctggacaagggcttgagtggatgggatggatcaaccctaacagtggtggcacaaactatgcacagaagtttcagggcagggtcaccatgaccagggacacgtccatcagcacagcctacatggagctgagcaggctgagatctgacgacacggccgtgtattactgtgcgacagactcctttgactactggggcaagggaaccctggtcaccgtctcgagt

SEQ ID NO: 537 - DNA, 342 bp, Homo Sapien
caggtccagctggtgcagtctggggctgaggtgaagaagcctggggcctcagtgaaggtctcctgcaaggcttctggatacaacttcaccggctactatatgcactgggtgcgacaggcccctggacaagggcttgagtggatgggatggatcaaccctaacagtggtggcacaaactatgcacagaagtttcagggcagggtcaccatgaccagggacacgtccatcagcacagcctacatggagctgagcaggctgagatctgacgacacggccgtgtattactgtgcgacagactcctttgactactggggccaaggcaccctggtcaccgtctcgaga

SEQ ID NO: 538 - DNA, 339 bp, Homo Sapien
gaggtccagctggtgcagtctgggcctgaggtgaagaagcctgggacctcagtgaaggtctcctgcaaggcttctggattcacctttactagctctgctgtgcagtgggtgcgacaggctcgtggacaacgccttgagtggataggatggatcgtcgttggcagtggtaacacaaactacgcacagaagttccaggaaagagtcaccattaccagggacatgtccacaagcacagcctacatggagctgagcagcctgagatccgaggacacggccgtgtattattgtgtggcagatacggtctactgggggcgagggaccacggtcaccgtctcgagt

SEQ ID NO: 539 - DNA, 342 bp, Homo Sapien
gaagtgcagctggtgcagtctggggctgaggtgaagaagcctggggcctcagtgaaggtctcctgcaaggcttctggatacaacttcaccggctactatatgcactgggtgcgacaggcccctggacaagggcttgagtggatgggatggatcaaccctaacagtggtggcacaaactatgcacagaagtttcagggcagggtcaccatgaccagggacacgtccatcagcacagcctacatggagctgagcaggctgagatctgacgacacggccgtgtattactgtgcgacagactcctttgactactgggggcgggggaccacggtcaccgtctcgagt

SEQ ID NO: 540 - DNA, 342 bp, Homo Sapien
caggtccagctggtgcagtctggagctgaggtgaagaagcctggggcctcagtgaaggtctcctgcaaggcttctggatacaacttcaccggctactatatgcactgggtgcgacaggcccctggacaaggacctgagtggatgggatggatcaaccctaacagtggtggcacaaactatgcacagaagtttcagggcagggtcaccatgaccagggacacgtccatcagcacagcctacatggagctgagcaggctgagatctgacgacacggccgtgtattactgtgcgacagactcctttgactactggggccgggggacaatggtcaccgtctcgagt

SEQ ID NO: 541 - DNA, 339 bp, Homo Sapien
caggtgcagctggtgcagtctgggcctgaggtgaagaagcctgggacctcagtgaaggtctcctgcaaggcttctggattcacctttactagctctgctgtgcagtgggtgcgacaggctcgtggacaacgccttgagtggataggatggatcgtcgttggcagtggtaacacaaactacgcacagaagttccaggaaagagtcaccattaccagggacatgtccacaagcacagcctacatggagctgagcagcctgagatccgaggacacggccgtgtattactgtgtggcagatacggtctactggggcaaaggaaccctggtcaccgtctcgagt

SEQ ID NO: 542 - DNA, 339 bp, Homo Sapien
caggtgcagctggtgcaatctgggcctgaggtgaagaagcctgggacctcagtgaaggtctcctgcaaggcttctggattcacctttactagctctgctgtgcagtgggtgcgacaggctcgtggacaacgccttgagtggataggatggatcgtcgttggcagtggtaacacaaactacgcacagaagttccaggaaagagtcaccattaccagggacatgtccacaagcacagcctacatggagctgagcagcctgagatccgaggacacggccgtgtattactgtgtggcagatacggtctactggggcaggggaaccctggtcaccgtctcgagt

SEQ ID NO: 543 - DNA, 345 bp, Homo Sapien
gaggtgcagctgttggagtctgggggaggcttggtacagcctggggggtccctgagactctcctgtgcagcctctggattcacctttagcagctatgccatgagctgggtccgccaggctccagggaaggggctggagtgggtctcagctattagtggtagtggtggtagcacatattacgcagactccgtgaagggccggttcaccatctccagagacaattccaagaacacgctgtatctgcaaatgaacagcctgagagccgaggacacggccgtgtattactgtgcgactgagcctccttttgatatctggggccgagggacaatggtcaccgtctcgagt

SEQ ID NO: 544 - DNA, 342 bp, Homo Sapien
gaggtgcagctggtgcagtctggggctgaggtgaagaagcctggggcctcagtgaaggtctcctgcaaggcttctggatacaacttcaccggctactatatgcactgggtgcgacaggcccctggacaaggacttgagtggatgggatggatcaaccctaacagtggtggcacaaactatgcacagaagtttcagggcagggtcaccatgaccagggacacgtccatcagcacagcctacatggagctgagcaggctgagatctgacgacacggccgtgtattactgtgcgacagactcctttgactactgggggcgagggaccacggtcaccgtctcgagt

SEQ ID NO: 545 - DNA, 342 bp, Homo Sapien
caggtgcagctggtgcagtctggggctgaggtgaagaagcctggggcctcagtgaaggtctcttgcaaggcttctggatacaacttcaccggctactatatgcactgggtgcgacaggcccctggacaagggcttgagtggatgggatggatcaaccctaacagtggtggcacaaactatgcacagaagtttcagggcagggtcaccatgaccagggacacgtccatcagcacagcctacatggagctgagcaggctgagatctgacgacacggccgtgtattactgtgcgacagactcctttgactactggggccggggaaccctggtcaccgtctcgagt

SEQ ID NO: 546 - DNA, 342 bp, Homo Sapien
gaagtgcagctggtgcagtctggggctgaggtgaagaagcctggggcctcagtgaaggtctcttgcaaggcttctggatacaacttcaccggctactatatgcactgggtgcgacaggcccctggacaagggcttgagtggatgggatggatcaaccctaacagtggtggcacaaactatgcacagaagtttcagggcagggtcaccatgaccagggacacgtccatcagcacagcctacatggagctgagcaggctgagatctgacgacacggccgtgtattactgtgcgacagactcctttgactactggggccgagggaccacggtcaccgtctcgagt

SEQ ID NO: 547 - DNA, 342 bp, Homo Sapien
gaagtgcagctggtgcagtctggggctgaggtgaagaagcctggggcctcagtgaaggtctcctgcaaggcttctggatacaacttcaccggctactatatgcactgggtgcgacaggcccctggacaaggacttgagtggatgggatggatcaaccctaacagtggtggcacaaactatgcacagaagtttcagggcagggtcaccatgaccagggacacgtccatcagcacagcctacatggagctgagcaggctgagatctgacgacacggccgtgtattactgtgcgacagactcctttgactactggggccagggaaccctggtcaccgtctcgagt

SEQ ID NO: 548 - DNA, 342 bp, Homo Sapien
caggtgcagctgcaggagtcgggggctgaggtgaagaagcctggggcctcagtgaaggtctcttgcaaggcttctggatacaacttcaccggctactatatgcactgggtgcgacaggcccctggacaagggcttgagtggatgggatggatcaaccctaacagtggtggcacaaactatgcacagaagtttcagggcagggtcaccatgaccagggacacgtccatcagcacagcctacatggagctgagcaggctgagatctgacgacacggccgtgtattactgtgcgacagactcctttgactactgggggcgggggaccacggtcaccgtctcgagt

SEQ ID NO: 549 - DNA, 342 bp, Homo Sapien
gaggtgcagctggtgcagtctggggctgaggtgaagaagcctggggcctcagtgaaggtctcttgcaaggcttctggatacaacttcaccggctactatatgcactgggtgcgacaggcccctggacaagggcttgagtggatgggatggatcaaccctaacagtggtggcgcaaactatgcacagaagtttcagggcagggtcaccatgaccagggacacgtccatcagcacagcctacatggagctgagcaggctgagatctgacgacacggccgtgtattactgtgcgacagactcctttgactactggggccggggaaccctggtcaccgtctcgagt

SEQ ID NO: 550 - DNA, 342 bp, Homo Sapien
caggtgcagctggtgcagtctggggctgaggtgaagaagcctggggcctcagtgaaggtctcttgcaaggcttctggatacaacttcaccggctactatatgcactgggtgcgacaggcccctggacaagggcttgagtggatgggatggatcaaccctaacagtggtggcacaaactatgcacagaagtttcagggcagggtcaccatgaccagggacacgtccatcagcacagcctacatggagctgagcaggctgagatctgacgacacggccgtgtattactgtgcgacagactcctttgactactggggccggggcaccctggtcaccgtctcgagt

SEQ ID NO: 551 - DNA, 342 bp, Homo Sapien
caggtccagctggtacagtctggagctgaggtgaagaagcctggggcctcagtgaaggtctcttgcaaggcttctggatacaacttcaccggctactatatgcactgggtgcgacaggcccctggacaagggcttgagtggatgggatggatcaaccctaacagtggtggcacaaactatgcacagaagtttcagggcagggtcaccatgaccagggacacgtccatcagcacagcctacatggagctgagcaggctgagatctgacgacacggccgtgtattactgtgcgacagactcctttgactactggggccgagggacaatggtcaccgtctcgagt

SEQ ID NO: 552 - DNA, 342 bp, Homo Sapien
caggtccagctggtgcagtctggggctgaggtgaagaagcctggggcctcagtgaaggtctcttgcaaggcttctggatacaacttcaccggctactatatgcactgggtgcgacaggcccctggacaagggcttgagtggatgggatggatcaaccctaacagtggtggcacaaactatgcacagaagtttcagggcagggtcaccatgaccagggacacgtccatcagcacagcctacatggagctgagcaggctgagatctgacgacacggccgtgtattactgtgcgacagactcctttgactactgggggagagggaccacggtcaccgtctcgagt

SEQ ID NO: 553 - DNA, 342 bp, Homo Sapien; identical to SEQ ID NO: 545

SEQ ID NO: 554 - DNA, 384 bp, Homo Sapien
ggggtgcagctggtgcagtctggggctgaggtgaagaagcctggggcctcagtgaaggtctcctgcaaggcttctggatacaccttcaccgactactatgtgcactgggtgcgacaggccccgggccaagggcctgagtggatgggatggatcaaccctaacaatggaggcacaaagtatgcacagaagttccagggcagagtcaccatgaccacagacacgtccacgagcaccgcctacatggagttgaggagcctgagatctgacgacacggccctatattactgtgcgagagatctgttaccctattacggtgactaccgggcagacaaaattgatgattttgatatctggggcaggggaaccctggtcaccgtctcgagt

SEQ ID NO: 555 - DNA, 342 bp, Homo Sapien
caggtgcagctggtgcagtctggggctgaggtgaagaagcctggggcctcagtgaaggtctcctgcaaggcttctggatacaacttcaccggctactatatacactgggtgcgacaggcccctggacaagggcttgagtggatgggatggatcaaccctaacagtggtggcacaaactatgcacagaagtttcagggcagggtcatcatgaccagggacacgtccatcagcacagcctacatggaactgagcaggctgagatctgacgacacggccgtgtattactgtgcgacagactcctttgactactggggccggggaaccctggtcaccgtctcgagt

SEQ ID NO: 556 - DNA, 342 bp, Homo Sapien; identical to SEQ ID NO: 178

SEQ ID NO: 557 - DNA, 342 bp, Homo Sapien
gaggtgcagctggtgcagtctggggctgaggtgaagaagcctggggcctcagtgaaggtctcttgcaaggcttctggatacaacttcaccggctactatatgcactgggtgcgacaggcccctggacaagggcttgagtggatgggatggatcaaccctaacagtggtggcacaaactatgcacagaagtttcagggcagggtcaccatgaccagggacacgtccatcagcacagcctacatggagctgagcaggctgagatctgacgacacggccgtgtattactgtgcgacagactcctttgactactggggcagagggacaatggtcaccgtctcgagt

SEQ ID NO: 558 - DNA, 342 bp, Homo Sapien
gaggtgcagctggtgcagtctggggctgaggtgaagaagcctggggcctcagtgaaggtctcctgcaaggcttctggatacaacttcaccggctactatatgcactgggtgcgacaggcccctggacaagggcttgagtggatgggatggatcaaccctaacagtggtggcacaaactatgcacagaagtttcagggcagggtcatcatgaccagggacacgtccatcagcacagcctacatggaactgagcaggctgacatctgacgacacggccgtgtattactgtgcgacagactcctttgactactgggggcgagggaccacggtcaccgtctcgaga

SEQ ID NO: 559 - DNA, 342 bp, Homo Sapien; identical to SEQ ID NO: 110

SEQ ID NO: 560 - DNA, 357 bp, Homo Sapien
gaggtccagctggtacagtctggggctgaggtgaagaagcctggggccccagtgaaggtttcctgcaagacatctggatacggcttcagtaactactatatgcactgggtgcgacaggcccctggacaagggcttgagtggctgggaatgatcaaccccagtgatggttctcaacacttcgcacagaggttccgggacagagtctcctttaccagcgacacgtccacgagcgcagtctacatggagctggccggcctgagatctgacgacacggccgtgtattactgtgcgagagagaaagcgaattcgatgtactttgactactggggccagggaaccctggtcaccgtctcgagt

SEQ ID NO: 561 - DNA, 360 bp, Homo Sapien
caggtacagctgcagcagtcaggtccaggactggtgaagccctcgcagaccctctcactcacctgtgccatctccggggacagtatctctagcagcagtgctacttggaactggatcagacagtccccatcgagaggccttgagtggctgggaaggacatactacaggtccaagtggtataatgattatgcagtatctgtgaaaagtcgaataaccatcgaccctgacacatccaagaaccagttctccctgcagctgaactctgtgactcccgaggacacggctgtgtattactgtgcaagacagctgggtggtaggattgaattctggggccaaggaaccctggtcaccgtctcgagt

SEQ ID NO: 562 - DNA, 399 bp, Homo Sapien
caggtccagctggtacagtctggggctgaggtgaagaagcctggggcctcagtgaggatttcctgcaagacatctggattcacctttaccagctactttatccactgggtgcggcaggccccaggacaaaggccagagtggatgggcgttatcaacccaagccgtggcaacgcagactacgcaccgaggttccgtggcagagtcaccatgacccgggacaagtccacgcacactgtttacatggatctgaagagcctcagatctgacgacgcggccatatattactgtgccagagatcggcttggtggccttcttgattactacgacagtagtgattcttcgaagaattttgatgcttttgatttctggggccagggaaccctggtcaccgtctcgagt

SEQ ID NO: 563 - DNA, 342 bp, Homo Sapien
gaggtccagctggtgcagtctggggctgaggtgaagaagcctggggcctcagtgaaggtctcttgcaaggcttctggatacaacttcaccggctactatatgcactgggtgcgacaggcccctggacaagggcttgagtggatgggatggatcaaccctaacagtggtggcacaaactatgcacagaagtttcagggcagggtcaccatgaccagggacacgtccatcagcacagcctacatggagctgagcaggctgagatctgacgacacggccgtgtattactgtgcgacagactcctttgactactggggccaaggaacaatggtcaccgtctcgagt

SEQ ID NO: 564 - DNA, 342 bp, Homo Sapien; identical to SEQ ID NO: 112

SEQ ID NO: 565 - DNA, 342 bp, Homo Sapien
gaagtgcagctggtgcagtctggggctgaggtgaagaagcctggggcctcagtgaaggtctcttgcaaggcttctggatacaacttcaccggctactatatgcactgggtgcgacaggcccctggacgagggcttgagtggatgggatggatcaaccctaacagtggtggcacaaactatgcacagaagtttcagggcagggtcaccatgaccagggacacgtccatcagcacagcctacatggagctgagcaggctgagatctgacgacacggccgtgtattactgtgcgacagactcctttgactactggggccaaggaaccctggtcaccgtctcgagt

SEQ ID NO: 566 - DNA, 384 bp, Homo Sapien
gaggtgcagctggtgcagtctggacctgaagtgaagaagcctggggcctcagtgaaggtctcctgcaaggcttctggatacaccttcaccgactactttctcaattgggtgcgacaggcccctggacaagggcttgagtggattgggtggatcaaccctaacactggtggcacaaactatgcacagaactttcagggcagggtcaccgtgaccagggacgcgtccatcagcacggcctatatggagctaaggagcctgacatctgccgacacggccatatattattgtgcgagaggggcctatgattacgtgtgggggagtcatcgttatgtcgctgatgctttcgatatctggggccaaggcaccctggtcaccgtctcgagt

SEQ ID NO: 567 - DNA, 339 bp, Homo Sapien
caggtccagctggtgcagtctgggcctgaggtgaagaagcctgggacctcagtgaaggtctcctgcaaggcttctggattcacctttactagctctgctgtgcagtgggtgcgacaggctcgtggacaacgccttgagtggataggatggatcgtcgttggcagtggtaacacaaactacgcacagaagttccaggaaagagtcaccattaccagggacatgtccacaagcacagcctacatggagctgagcagcctgagatccgaggacacggccgtgtattactgtgtggcagatacggtctactggggccaaggcaccctggtcaccgtctcgagt

SEQ ID NO: 568 - DNA, 342 bp, Homo Sapien
gaggtgcagctggtgcagtctggggctgaggtgaagaagcctggggcctcagtgaaggtctcttgcaaggcttctggatacaacttcaccggctactatatgcactgggtgcgacaggcccctggacaagggcttgagtggatgggatggatcaaccctaacagtggtggcacaaactatgcacagaagtttcagggcagggtcaccatgaccagggacacgtccatcagcacagcctacatggagctgagcaggctgagatctgacgacacggccgtgtattactgtgcgacagactcctttgactactggggcaaaggcaccctggtcaccgtctcgagt

SEQ ID NO: 569 - DNA, 342 bp, Homo Sapien
caggtccagctggtgcagtctggggctgaggtgaagaagcctggggcctcagtgaaggtctcctgcaaggcttctggatacaacttcaccggctactatatacactgggtgcgacaggcccctggacaagggcttgagtggatgggatggatcaaccctaacagtggtggcacaaactatgcacagaagtttcagggcagggtcatcatgaccagggacacgtccatcagcacagcctacatggaactgagcaggctgagatctgacgacacggccgtgtattactgtgcgacagactcctttgactactggggcagaggaaccctggtcaccgtctcgagt

SEQ ID NO: 570 - DNA, 342 bp, Homo Sapien
caggtgcagctggtgcaatctggggctgaggtgaagaagcctggggcctcagtgaaggtctcttgcaaggcttctggatacaacttcaccggctactatatgcactgggtgcgacaggcccctggacaagggcttgagtggatgggatggatcaaccctaacagtggtggcacaaactatgcacagaagtttcagggcagggtcaccatgaccagggacacgtccatcagcacagcctacatggagctgagcaggctgagatctgacgacacggccgtgtattactgtgcgacagactcctttgactactggggccggggaaccctggtcaccgtctcgagt

SEQ ID NO: 571 - DNA, 369 bp, Homo Sapien
caggtgcagctgcaggagtcggggggaggcttggtacagcctggggggtccctgagcctctcctgtgcaacctctggattcacctttggcaattatgtcatgaggtgggtccgccaggctccagggaaggggctggagtgggtctcaactatcaccgagggtggtggtgattttatatactacgcagactccgtgaagggccggttcgccatctccagggacaattccaagagcacggtgtatctgcacatgaatggcctgagagtcgaggacacggccgtttattactgtgcgaaatccgggggcgatgataatagcaactataattttgagtattggggccaaggcaccctggtcaccgtctcgagt

SEQ ID NO: 572 - DNA, 399 bp, Homo Sapien
caggtccagctggtgcagtctggggctgaggtgaagaagcctggggcctcagtgaggatttcctgcaagacatctggattcacctttaccagctactttatccactgggtgcggcaggccccaggacaaaggccagagtggatgggcgttatcaacccaagccgtggcaacgcagactacgcaccgaggttccgtggcagagtcaccatgacccgggacaagtccacgcacactgtttacatggatctgaagagcctcagatctgacgacgcggccatatattactgtgccagagatcggcttggtggccttcttgattactacgacagtagtgattcttcgaagaattttgatgcttttgatttctggggccaaggcaccctggtcaccgtctcgagt

SEQ ID NO: 573 - DNA, 384 bp, Homo Sapien
caggtgcagctggtgcagtctggggctgaggtgaggaagcctggggcctcagtgaaagtctcctgcaaggcttctggatacacattcaccgactactatttacactgggtgagacaggcccctggactgggtcttgagtggatgggatggatcaaccctaacactggtggcacagactatggacagaagtttcagggcagggtcaccatgaccagggacacgtccatcaacacagcctacatggagctgagcagcctgagatctgacgacacggccgtgtattattgtgcgagaggggcctatgattacgtgtgggggagtcatcgttatgtcgctgatgctttcgatatctggggccaagggaccacggtcaccgtctcctca

SEQ ID NO: 574 - DNA, 384 bp, Homo Sapien
aaggtccagctggtgcagtctggggctgaggtgaagaagcctggggcctcagtgaaggtctcctgcaaggcctctggatacactttcaccgacttctatatacactgggtgcgacaggcccctggacaagggcttgagtggatgggatggatcaattccaaaagtggtgacacacactatgcacagaagtttcagggcagggtcaccttgaccagggacacgtccaccgacacagcctacatggagctgagcaggctgacatctgacgacacggccgtgtattactgtgcgagaggggcctatgattacgtttgggggagttctcgttatgtcgctgatgctttcgatatctggggccgggggacaatggtcaccgtctcctca

SEQ ID NO: 575 - DNA, 339 bp, Homo Sapien
gaagtgcagctggtgcagtctgggcctgaggtgaagaagcctgggacctcagtgaaggtctcctgcaaggcttctggattcacctttactaactctgctgtgcagtgggtgcgacaggctcgtggacaacgccttgagtggataggatggatcgtcgttggcagtggtaacataaactacgcacagaagttccaggaaagagtcaccattaccagggacatgtccacaagcacagcctacatggagctgagcagcctgaaatccgaggacacggccgtgtattattgtgtggcagatacggtctactggggcagagggacaatggtcaccgtctcgagt

SEQ ID NO: 576 - DNA, 342 bp, Homo Sapien
caggtgcagctggtgcagtctggggctgaggtgaagaagcctggggcctcagtgaaggtctcctgcaaggcttctggatacaacttcaccggctactatatgcactgggtgcgacaggcccctggacaagggcttgagtggatgggatggatcaaccctaacagtggtggcacaaactatgcacagaagtttcagggcagggtcaccatgaccagggaaacgtccatcagcacagcctacatggagctgagcaggctgagatctgacgacacggccgtgtattactgtgcgacagactcctttgactactggggccgggggacaatggtcaccgtctcgagt

SEQ ID NO: 577 - DNA, 342 bp, Homo Sapien
caggtacagctgcagcagtcaggggctgaggtgaagaagcctggggcctcagtgaaggtctcttgcaaggcttctggatacaacttcaccggctactatatgcactgggtgcgacaggcccctggacaagggcttgagtggatgggatggatcaaccctaacagtggtggcacaaactatgcacagaagtttcagggcagggtcaccatgaccagggacacgtccatcagcacagcctacatggagctgagcaggctgagatctgacgacacggccgtgtattactgtgcgacagactcctttgactactggggccaagggacaatggtcaccgtctcgagt

SEQ ID NO: 578 - DNA, 354 bp, Homo Sapien
caggtacagctgcagcagtcaggggctgaggtgaagacgcctggggcgtcagtcaaggtctcctgcaaggcttctggatacaccttcaccgacaattatatacattgggtgagacaggcccctggacaagggcttgagtggatgggacggatcaatgttaacagtggtgccacaaactatgcacggaaatttcagggtagggtcaccatgaccggggacacgtccatcagcacagcctacatggacctgagcagactgaagtctgacgacacggccgtgtattactgtgcgagagatttccgctactccggtgtggacgtctggggccaagggacaatggtcaccgtctcgagt

SEQ ID NO: 579 - DNA, 384 bp, Homo Sapien
caggtgcagctggtggagtctggggctgaggtgaagaagcctggggcctcagtgaaggtctcctgcaaggcttctggatacacgttcaccgaccactatatacagtggctgcgacaggcccctggacaagggcttgagtggatgggatggatgaatccgaagagtggtggcacaaactatgcacagaagtttcagggcagggtcaccctgaccagggacacgtccatcagcacagcctacatggacctgagtgggctgagatttgacgacacggccatatatttctgtgcgagcgacccgactataccaccttcccccaactatgactactactactacgctatggacctctggggcaagggcaccctggtcaccgtctcgagt

SEQ ID NO: 580 - DNA, 345 bp, Homo Sapien
gaggtgcagctggtggagtccggcccaggactggtgaagccttcggagaccctgtccctcacctgcactgtctctggtggctccatgacttctaacttttggagctggatccggcagaccccagggaagggactggagtggattggctatgtcctttatactgggagcaccaactccaatccctccctcaagagtcgagtcaccatgtcagtagacacgtccaagaaccaggtctccctgaccctgagctctgtgaccgccgcagacacggccatttactactgtgcgagaggcaatggctggtacctcccctggggcagggggacaatggtcaccgtctcgagt

SEQ ID NO: 581 - DNA, 342 bp, Homo Sapien
gaagtgcagctggtgcagtctggggctgaggtgaagaagcctggggcctcagtgaaggtctcttgcaaggcttctggatacaacttcaccggctactatatgcactgggtgcgacaggcccctggacaagggcttgagtggatgggatggatcaaccctaacagtggtggcacaaactatgcacagaagtttcagggcagggtcaccatgaccagggacacgtccatcagcacagcctacatggagctgagcaggctgagatctgacgacacggccgtgtattactgtgcgacagactcctttgactactggggcaaagggacaatggtcaccgtctcgagt

SEQ ID NO: 582 - DNA, 342 bp, Homo Sapien
caggtacagctgcagcagtcaggggctgaggtgaagaagcctggggcctcagtgaaggtctcctgcaaggcttctggatacaacttcaccggctactatatgcactgggtgcgacaggcccctggacaagggcttgagtggatgggatggatcaaccctaacagtggtggcacaaactatgcacagaagtttcagggcagggtcaccatgaccagggacacgtccatcagcacagcctacatggagctgagcaggctgagatctgacgacacggccgtgtattactgtgcgacagactcctttgactactggggccaagggacaatggtcaccgtctcgagt

SEQ ID NO: 583 - DNA, 342 bp, Homo Sapien
caggtgcagctggtgcaatctggggctgaggtgaagaagcctggggcctcagtgaaggtctcttgcaaggcttctggatacaacttcaccggctactatatgcactgggtgcgacaggcccctggacaagggcttgagtggatgggatggatcaaccctaacagtggtggcacaaactatgcacagaagtttcagggcagggtcaccatgaccagggacacgtccatcagcacagcctacatggagctgagcaggctgagatctgacgacacggccgtgtattactgcgcgacagactcctttgactactggggcaagggaaccctggtcaccgtctcgagt

SEQ ID NO: 584 - DNA, 342 bp, Homo Sapien
caggtccagctggtgcagtctggggctgaggtgaagaagcctggggccccggtgaaggtctcttgcaaggcttctggatacaacttcaccggctactatatgcactgggtgcgacaggcccctggacaagggcttgagtggatgggatggatcaaccctaacagtggtggcacaaactatgcacagaagtttcagggcagggtcgccatgaccagggacacgtccatcagcacagcctacatggagctgagcaggctgagatctgacgacacggccgtgtattactgtgcgacagactcctttgactactggggccaagggacaatggtcaccgtctcgagt

SEQ ID NO: 585 - DNA, 375 bp, Homo Sapien
cagatgcagctggtgcaatcaggggctgaggtgaagaggcctggggcctcagttaacctttcctgcaaggcatctggatactccttcagcagatactatatccactgggtgcgacaggcccctggacagggacttgagttgatgggacggatcaaccctggaggtggtaccacaacctacgcacagaaattccagggcagagtcaccctgtccagggacacgtccacgaacaccatcttcatggaactgaacggcctcacatctgaagacacggccatgtattattgtgcgaggtcgaactacgatattttggctggttatgggcctgatgcttttgatttctggggccaagggacaatggtcaccgtctcgagt

SEQ ID NO: 586 - DNA, 342 bp, Homo Sapien; identical to SEQ ID NO: 570

SEQ ID NO: 587 - DNA, 345 bp, Homo Sapien
caggtacagctgcagcagtcaggggctgaggtgaagaaacctggggccccactgaaggtctcctgcaagacttctggattcaccttcaccggctactatatacactgggtgcgacaggcccctggacaagggcttgagtggatgggacgggtcgacccttacaatggtgccacaaactttgcacagaagtttcagggcagagtcaccatgaccacagacacatccacgagcacaacctacatggaactgatgagcctgagatctgacgacacggccgtatattactgtgcgagagggtgggaacttgactcctggggccaaggaaccctggtcaccgtctcctca

SEQ ID NO: 588 - DNA, 342 bp, Homo Sapien
caggtgcagctggtgcagtctggggctgaggtgaagaagcctggggcctcagtgaaggtctcctgcaaggcttctggatacaacttcaccggctactatatgcactgggtgcgacaggcccctggacaagggcttgagtggatgggatggatcaaccctaacagtggtggcacaaactatgcacagaagtttcagggcagggtcaccatgaccagggacacgtccatcagcacagcctacatggagctgagcaggctgagatctgacgacacggccgtgtattactgtgcgacagactcctttgactactggggccggggaaccctggtcaccgtctcgagt

SEQ ID NO: 589 - DNA, 342 bp, Homo Sapien
caggtgcagctggtgcagtctggggctgaggtgaagaagcctggggcctcagtgaaggtctcctgcaaggcttctggatacaatttcaccggctactatttgcactgggtgcgacaggcccctggacaagggcttgagtggatgggatggatcgaccctaacagtggtggcacagactatgcacagcagtttcagggcagggtcaccgtgaccagggacacgtccatcagcacagcctacatggaattgagcgggctgagatctgacgacacggccgtgtactactgtgcgtcagactcttttgaccactggggccagggaaccctggtcaccgtctcgagt

SEQ ID NO: 590 - DNA, 342 bp, Homo Sapien
caggtacagctgcagcagtcaggagctgaggtgaagaagcctggggcctcagtgaaggtctcctgcaaggcttctggatacaacttcaccggctactatatgcactgggtgcgacaggcccctggacaagggcttgagtggatgggatggatcaaccctaacagtggtggcacaaactatgcacagaagtttcagggcagggtcaccatgaccagggacacgtccatcagcacagcctacatggagctgagcaggctgagacctgacgacacggccgtgtattactgtgcgacagactcctttgactactggggcaaagggacaatggtcaccgtctcgagt

SEQ ID NO: 591 - DNA, 342 bp, Homo Sapien
gaggtccagctggtacagtctggagctgaggcgaagaagcctggggcctcagtgaaggtctcctgcaaggcttctggatacaacttcaccggctactatatgcactgggtgcgacaggcccctggacaaggacttgagtggatgggatggatcaaccctaacagtggtggcacaaactatgcacagaagtttcagggcagggtcaccatgaccagggacacgtccatcagcacagcctacatggagctgagcaggctgagatctgacgacacggccgtgtattactgtgcgacagactcctttgactactggggccaaggcaccctggtcaccgtctcgagt

SEQ ID NO: 592 - DNA, 342 bp, Homo Sapien
caggtccagctggtacagtctggagctgaggtgaagaagcctggggcctcagtgaaggtctcctgcaaggcttctggatacaatttcaccggctactatttgcactgggtgcgacaggcccctggacaagggcttgagtggatgggatggatcaaccctaacagtggtggcacagactatgcacagaagtttcagggcagggtcaccgtgaccagggacacgtccatcagcacagcctacatggaactgggcgggctgagatctgacgacacggccgtgtactactgtgtgtccgactcttttgaccactggggccggggcaccctggtcaccgtctcgagt

SEQ ID NO: 593 - DNA, 342 bp, Homo Sapien
caggtccagctggtgcagtctggggctgaggtgaagaagcctggggcctcagtgaaggtctcctgcaaggcttctggatacaacttcaccggctactatatgcactgggtgcgacaggcccctggacaagggcttgagtggatgggatggatcaaccctaacagtggtggcacaaactatgcacagaagtttcagggcagggtcaccatgaccagggacacgtccatcagcacagcctacatggagctgagcaggctgagatctgacgacacggccgtgtattactgtgcgacagactcctttgactactggggccagggcaccctggtcaccgtctcgagt

SEQ ID NO: 594 - DNA, 342 bp, Homo Sapien
gaagtgcagctggtgcagtctggggctgaggtgaagaagcctggggcctcagtgaaggtctcctgcaaggcttctggatacaacttcaccggctactatatgcactgggtgcgacaggcccctggacaaggacttgagtggatgggatggatcaaccctaacagtggtggcacaaactatgcacagaagtttcagggcagggtcaccatgaccagggacacgtccatcagcacagcctatatggagctgagcaggctgagatctgacgacacggccgtgtattactgtgcgacagactcctttgactactggggccgggggacaatggtcaccgtctcgagt

SEQ ID NO: 595 - DNA, 357 bp, Homo Sapien
caggtgcagctggtgcagtctggggctgacgtgaagaagcctggggcctcagtgaaaatttcctgcaaggcatctggatacaccttcaccaagtactatatgcactgggtgcgacaggcccctggacaaggacttgagtggatgggaataatcaaccctactaatggttacacaagctacgcacagaagttccagggcagagtcaccatgaccagtgacacgtccgcgagcacagtctccatggagctgagcagcctgagatctgaagacacggccgtgtattactgtacgagatcttacagtaactacgattcttttgatatctggggcagggggacaatggtcaccgtctcgagt

SEQ ID NO: 596 - DNA, 366 bp, Homo Sapien
caggtacagctgcagcagtcaggacctgaggtgaagaagcctggggcctcagtgaaaatctcctgcaagacttctggttatacctttagcagtttcggcatcagttgggtgcgacaggcccctggacaagggcctgagtggatgggatgggtcagtccttacagtggtgacacggactatgcacagaagttccggggcagagtcaccatgaccatagactcatccacggacacagcctacgtggagatgaggagcctgaggtctgacgacacggccatatattattgtgcgaattcacctatctctgatggcagttcgtcctcgtatgacaactggggcaaaggcaccctggtcaccgtctcgagt

SEQ ID NO: 597 - DNA, 366 bp, Homo Sapien
caggtgcagctggtgcagtctggggctgaggtgaaggagcctgggtcctcggtgagggtctcctgtaagtcttctggaggaaccttcagcaattatgcaatcagctgggtgcgacaggcccctggacaagggcttgagtggatgggagggatcatcccaggctttgggaaaacaaattacgcacagaagttccagggcagagtcacgatcaccgcggacgcatccacgagtacaacctacatggaactgcgcaccttaagatctggcgacacggccgtatactactgtgcgagagatcggggccccgatataggagtggctcattttgactcctggggcaaggggacaatggtcaccgtctcgagt

SEQ ID NO: 598 - DNA, 339 bp, Homo Sapien; identical to SEQ ID NO: 567

SEQ ID NO: 599 - DNA, 342 bp, Homo Sapien; identical to SEQ ID NO: 116

SEQ ID NO: 600 - DNA, 342 bp, Homo Sapien
caggtacagctgcagcagtcaggggctgaggtgaagaagcctggggcctcagtgaaggtctcctgcaaggcttctggatacaacttcaccggctactatatgcactgggtgcgacaggcccctggacaagggcttgagtggatgggatggatcaaccctaacagtggtggcacaaactatgcacagaagtttcagggcagggtcaccatgaccagggacacgtccatcagcacagcctacatggagctgagcaggctgagatctgacgacacggccgtgtattactgtgcgacagactcctttgactactggggccgagggacaatggtcaccgtctcgagt

SEQ ID NO: 601 - DNA, 342 bp, Homo Sapien
gaggtgcagctggtggagtccggggctgaggtgaagaagcctggggcctcagtgaaggtctcctgcaaggcttctggatacaacttcaccggctactatatacactgggtgcgacaggcccctggacaagggcttgagtggatgggatggatcaaccctaacagtggtggcacaaactatgcacagaagtttcagggcagggtcatcatgaccagggacacgtccatcagcacagcctacatggaactgagcaggctgagatctgacgacacggccgtgtattactgtgcgacagactcctttgactactggggcaaggggacaatggtcaccgtctcgagt

SEQ ID NO: 602 - DNA, 381 bp, Homo Sapien
gaggtccagctggtgcagtctggagcggaggtgaagaagcctggggcctcagtgaaggtctcatgtaagacttctggatataccttcaacgactactaccatcactgggtgcggcaggcccctggacaaggccttgagtggatgggatggatcaacccgcatacaggtgtcgcaaactatgcagagaagtataagggcaggctcgccatgaccggggacacgtccatcagtacaatttacatggacctgagtagtctcatttctgacgacacggccatatatttctgtgcgagagagaggtcagagtggaggaacacagtgtcgtctccctctgaatacttccaccactggggcaagggaaccctggtcaccgtctcgagt

SEQ ID NO: 603 - DNA, 342 bp, Homo Sapien
gaggtgcagctggtgcagtctggggctgaggtgaagaagcctggggcctcagtgaaggtctcctgcaaggcttctggatacaacttcaccggctactatatgcactgggtgcgacaggcccctggacaagggcttgagtggatgggatggatcaaccctaacagtggtggcacaaactatgcacagaagtttcagggcagggtcaccatgaccagggacacgtccatcagcacagcctacatggagctgagcaggctgagatctgacgactcggccgtgtattactgtgcgacagactcctttgactactggggccgaggaaccctggtcaccgtctcgagt

SEQ ID NO: 604 - DNA, 342 bp, Homo Sapien; identical to SEQ ID NO: 178

SEQ ID NO: 605 - DNA, 378 bp, Homo Sapien
caggtgcagctgcaggagtcgggggctgaggtgaagaagcctggggcctccgtgaaggtttcctgcagggcatctggatacaccttcaccactaactctctgcactgggtgcgacaggcccctggacaaggacttgactggatgggagtcatcaaccccagggacggtagcgcaaccgtcgcacagaaattccagggcaggatcaccatgaccagtgacacgtcaacgagcacagtcttcttggcgctgagcagcctgacatctgacgacacgggcgtatatttctgtgcgagagatggcctggattaccgtgatacaagtcgaatccttgccccgactgatgtctggggcagaggcaccctggtcaccgtctcgagt

SEQ ID NO: 606 - DNA, 348 bp, Homo Sapien
caggtccagctggtacagtctggggctgaggtgaagaagcctgggactacagttaaaatctcctgcaaggtttctggatacaagttcaccgactactacatacactgggtacgacaggccccaggaaaagggcttgagtggatgggatttgttgatcctacagatgatgaaacaagattcgcagagaagttccagggcagactcaccatgaccgcggacacgtctagagacacagcctccatggaactgagcagcctgagatctgaggacacggccgtgtattactgtataagggggatcgccgcattggcggactggggccgggggacaatggtcaccgtctcgagt

SEQ ID NO: 607 - DNA, 342 bp, Homo Sapien
caggtacagctgcagcagtcaggggctgaggtgaagaagcctggggcctcagtgaaggtctcctgcaaggcttctggatacaacttcaccggctactatatgcactgggtgcgacaggcccctggacaagggcttgagtggatgggatggatcaaccctaacagtggtggcacaaactatgcacagaactttcagggcagggtcaccatgaccagggacacgtctatcagcacagcctacatggagctgagcaggctgagatctgacgacacggccgtttattactgtgcgacagactcctttgactactggggccgggggacaatggtcaccgtctcgagt

SEQ ID NO: 608 - DNA, 372 bp, Homo Sapien
caggtacagctgcagcagtcaggggctgaggtgaagaagcctggggcctcagtgaaggtttcctgcaaggcttctggatacatcttcggcacctatgccatacattgggtgcgccaggcccccggacaaagccttgagtggatgggatggatcaacgctggcaccggtaacacaaaatattcacagaagttccagggcagagtcaccattaccatggacacatccgcgaccacagcctacatggagctgagcagcctgagatctggagatacggctgtgtattactgcacaagaggggattattatgatagtcgtggttattacaaccgcttcgactactggggcaggggaaccctggtcaccgtctcgagt

SEQ ID NO: 609 - DNA, 342 bp, Homo Sapien
caggtgcagctggtgcagtctggggctgaggtggagaagcctggggcctcagtgaaggtctcttgcaaggcttctggatacaacttcaccggctactatatgcactgggtgcgacaggcccctggacaagggcttgagtggatgggatggatcaaccctaacagtggtggcacaaactatgcacagaagtttcagggcagggtcaccatgaccagggacacgtccatcagcacagcctacatggagctgagcaggctgagatctgacgacacggccgtgtattactgtgcgacagactcctttgactactggggccggggaaccctggtcaccgtctcgagt

SEQ ID NO: 610 - DNA, 342 bp, Homo Sapien
caggtgcagctggtgcagtctggggctgaggtgaagaggcctggggcctcagtgaaggtctcttgcaaggcttctggatacaacttcaccggctactatatgcactgggtgcgacaggcccctggacaagggcttgagtggatgggatggatcaaccctaacagtggtggcacaaactatgcacagaagtttcagggcagggtcaccatgaccagggacacgtccatcagcacagcctacatggagctgagcaggctgagatctgacgacacggccgtgtattactgtgcgacagactcctttgactactggggcaaaggaaccctggtcaccgtctcgagt

SEQ ID NO: 611 - DNA, 342 bp, Homo Sapien
caggtgcagctcgtgcagtctggggctgaggtgaagaagcctggggcctcagtgaaggtctcttgcaaggcttctggatacaacttcaccggctactatatgcactgggtgcgacaggcccctggacaagggcttgagtggatgggatggatcaaccctaacagtggtggcacaaactatgcacagaagttttagggcagggtcaccatgaccagggacacgtccatcagcacagcctacatggagctgagcaggctgagatctgacgacacggccgtgtattactgtgcgacagactcctttgactactggggcaagggaaccctggtcaccgtctcgagt

SEQ ID NO: 612 - DNA, 342 bp, Homo Sapien; identical to SEQ ID NO: 120

SEQ ID NO: 613 - DNA, 363 bp, Homo Sapien
caggtgcagctggtgcaatctggggctgaggtgaagaagcctggggcctcagtgaaggtctcctgcaaggctcctggatacagtttcaccgactactatttgcactgggtgcgacaggcccctggaataggacttgagtgggtgggatggatcaaccctaacaatggtggcacaaattatgcacagaagtttcggggcagggtcacgatgaccagggacacggccatcaacacagcctacatggacatgaggtggctgagatctgacgacacggccgtgtattactgtgcgacagatgggcccccgggtactggcaatgcttttgatatctggggcaggggcaccctggtcaccgtctcgagt

SEQ ID NO: 614 - DNA, 342 bp, Homo Sapien
gaggtgcagctggtgcagtctggggctgaggtgaagaagcctggggcctcagtgaaggtctcctgcaaggcttctggatacaacttcaccggctactatatgcactgggtgcgacaggcccctggacaagggcttgagtggatgggatggatcaaccctaacagtggtggcacaaactatgcacagaagtttcagggcagggtcaccatgaccagggacacgtccatcagcacagcctacatggagctgagcaggctgagatctgacgacacggccgtgtattactgtgcgacagactcctttgactactggggccagggaaccctggtcaccgtctcgagt

SEQ ID NO: 615 - DNA, 342 bp, Homo Sapien
gaggtgcagctggtggagtctggggctgaggtgaagaagcctggggcctcagtgaaggtctcctgcaaggcttctggatacaacttcaccggctactatatgcactgggtgcgacaggcccctggacaagggcttgagtggatgggatggatcaaccctaacagtggtggcacaaactatgcacagaagtttcagggcagggtcatcatgaccagggacacgtccatcagcacagcctacatggaactgagcaggctgacatctgacgacacggccgtgtattactgtgcgacagactcctttgactactggggcaggggcaccctggtcaccgtctcgagt

SEQ ID NO: 616 - DNA, 342 bp, Homo Sapien
caggtccagctggtacagtctggggctgaggtgaagaagcctggggcctcagtgaaggtctcttgcaaggcttctggatacaacttcaccggctactatatgcactgggtgcgacaggcccctggacaagggcttgagtggatgggatggatcaaccctaacagcggtggcacaaactatgcacagaagtttcagggcagggtcaccatgaccagggacacgtccatcagcacagcctacatggagctgagcaggctgagatctgacgacacggccgtgtattactgtgcgacagactcctttgactactggggccgaggaaccctggtcaccgtctcgagt

SEQ ID NO: 617 - DNA, 342 bp, Homo Sapien
gaagtgcagctggtgcagtctggggctgaggtgaagaagcctggggcctcagtgaaggtctcttgcaaggcttctggatacaacttcaccggctactatatgcactgggtgcgacaggcccctggacaagggcttgagtggatgggatggatcaaccctaacagtggtggcacaaactatgcacagaagtttcagggcagggtcaccatgaccagggacacgtccatcagcacagcctacatggagctgagcaggctgagatctgacgacacggccgtgtattactgtgcgacagactcctttgactactggggccaagggacaatggtcaccgtctcgagt

SEQ ID NO: 618 - DNA, 342 bp, Homo Sapien
caggtccagctggtacagtctggggctgaggtgaagaagcctggggcctcagtgaaggtctcctgcaaggcttctggatacaacttcaccggctactatatgcactgggtgcgacaggcccctggacaagggcttgagtggatgggatggatcaaccctaacagtggtggcacaaactatgcacagaagtttcagggcagggtcaccatgaccagggacacgtccatcagcacagcctacatggagctgagcaggctgagatctgacgacacggccgtgtattactgtgcgacagactcctttgactactggggcaggggcaccctggtcaccgtctcgagt

SEQ ID NO: 619 - DNA, 339 bp, Homo Sapien
caggtccagctggtgcagtctgggcctgaggtgaagaagcctgggacctcagtgaaggtctcctgcaaggcttctggattcacctttactagctctgctgtgcagtgggtgcgacaggctcgtggacaacgccttgagtggataggatggatcgtcgttggcagtggtaacacaaactacgcacagaagttccaggaaagagtcaccattaccagggacatgtccacaagcacagcctacatggagctgagcagcctgagatccgaggacacggccgtgtattattgtgtggcagatacggtctactggggcagagggacaatggtcaccgtctcgagt

SEQ ID NO: 620 - DNA, 342 bp, Homo Sapien
caggtgcagctggtgcagtctggagctgaggtgaagaagcctggggcctcagtgaaggtctcttgcaaggcttctggatacaacttcaccggctactatatgcactgggtgcgacaggcccctggacaagggcttgagtggatgggatggatcaaccctaacagtggtggcacaaactatgcacagaagtttcagggcagggtcaccatgaccagggacacgtccatcagcacagcctacatggagctgagcaggttgagatctgacgacacggccgtgtattactgtgcgacagactcctttgactactggggccgaggaaccctggtcaccgtctcgagt

SEQ ID NO: 621 - DNA, 384 bp, Homo Sapien
caggtccagctggtacagtctgggcctgaggtgaagaagcctggggcctcagtgaaggtctcctgtaaggcagctggatacacctttcccgacttctatatgcactgggtgcgacaggcccctggaaaaggacctgagtgggtgggatggatcaactctaatagtggcagcacaagacttgcagagagacttgagggcagggtcaccttgaccagggacacatccatcagcacagcctatatggagttgaccagcctcacatctgacgacacggccgtctattattgtgcgagaggggcctatgattacgtctgggggacttctcgctatgtcgctgatgctttcgatatctggggccaaggaactctggtcaccgtctcccca

SEQ ID NO: 622 - DNA, 342 bp, Homo Sapien
gaggtgcagctggtgcagtctggggctgaggtgaagaagcctggggcctcagtgaaggtctcctgcaaggcttctggatacaacttcaccggctactatatgcactgggtgcgacaggcccctggacaagggcttgagtggatgggatggatcaaccctaacagtggtggcacaaactatgcacagaagtttcagggcagggtcaccatgaccagggacacgtccatcagcacagcctacatggagctgagcaggctgagatctgacgacacggccgtgtattactgtgcgacagactcctttgactactggggccaaggcaccctggtcaccgtctcgagt

SEQ ID NO: 623 - DNA, 360 bp, Homo Sapien
gaggtgcagctggtgcagtctggggctgaggtgaagaagcctggggcctctgtgaaggtctcctgcaaggcttctggatacaccttcaccggctactatatacactgggtgcgacaggcccctggtcaagggcttgagtggatgggctggatcagccccaacagtggtgtcacaaactatgcacagaggtttcagggcagggtcaccatgtccagggacacgtccatcaccacagcctacatggagctgaacaggctgggatctgacgacacggccgtgtattactgtgcgagagaagggcgggaggacggtgtcctctttgactactggggccgaggaaccctggtcaccgtctcgagt

SEQ ID NO: 624 - DNA, 342 bp, Homo Sapien
caggtacagctgcagcagtcaggagctgaggtgaagaagcctggggcctcagtgaaggtctcctgcaaggcttctggatacaacttcaccggctactatatgcactgggtgcgacaggcccctggacaaggacttgagtggatgggatggatcaaccctaacagtggtggcacaaactatgcacagaagtttcagggcagggtcaccatgaccagggacacgtccatcagcacagcctacatggagctgagcaggctgggatctgacgacacggccgtgtattactgtgcgacagactcctttgactactggggccgaggcaccctggtcaccgtctcgagt

SEQ ID NO: 625 - DNA, 342 bp, Homo Sapien
caggtacagctgcagcagtcaggggctgaggtgaagaagcctggggcctcagtgaaggtctcttgcaaggcttctggatacaacttcaccggctactatatgcactgggtgcgacaggcccctggacaagggcttgagtggatgggatggatcaaccctaacagtggtggcacaaactatgcacagaagtttcagggcagggtcaccatgaccagggacacgtccatcagcacagcctacatggagctgagcaggctgagatctgacgacacggccgtgtattactgtgcgacagactcctttgactactggggccgaggaaccctggtcaccgtctcgagt

SEQ ID NO: 626 - DNA, 354 bp, Homo Sapien
gaggtccagctggtgcagtctggagctgaggtgaagaagcctggggcctcagtgaagctctcctgcaagacttctggacacaccttcactaactatgctttccattggctgcgccaggcccccggacaaaggcctgagtggctgggatggatcaacgctgacaatggtaacacaaaatattcacagagtttccaggatagagtcaccattaccagggacatatccgcgaacacagcctacatggagatgagcagactgaaatcagaagacacggcttattattactgtgcgagagatccctggagtggcgtccttgaccactggggcaaaggaaccctggtcaccgtctcgagt

SEQ ID NO: 627 - DNA, 381 bp, Homo Sapien
gaggtccagctggtgcagtctggagctgaggtgaagaagcctggggcctcagtgaaagtctcctgtaaggcttctggttacagctttcgcagctatggtatcgtctgggtgcgacaggcccctggacagggacttgagtggatgggatggatcagcgcctacaatggtaacacaaactatgcacagaagctccagggcagagtcaccatgaccacagacacatccacgagcacagcctacatggagctgaggagcctgagatctgacgacacggccgtgtattactgtgtgagaggggaccgccattacgatattctgactggttactcccctgtctggttcgacccctgggggaaggggaccacggtcaccgtctcgagt

SEQ ID NO: 628 - DNA, 330 bp, Homo Sapien
cagtctgtcgtgacgcagccgccctcagcgtctgggacccccgggcagagggtcaccatctcttgttctggaagcagctccaacatcggaagtaatactgtaaactggtaccagcagctcccaggaacggcccccaaactcctcatctatagtaataatcagcggccctcaggggtccctgaccgattctctggctccaagtctggcacctcagcctccctggccatcagtgggctccagtctgaggatgaggctgattattactgtgcagcatgggatgacagcctgaatggttatgtcttcggaactgggaccaagctgaccgtccta

SEQ ID NO: 629 - DNA, 330 bp, Homo Sapien
cagtctgtgctgactcagccaccctcagcgtctgggacccccgggcagagggtcaccatctcttgttctggaagcagctccaacatcggaagtaatactgtaaactggtaccagcagctcccaggaacggcccccaaactcctcatctatagtaataatcagcggccctcaggggtccctgaccgattctctggctccaagtctggcacctcagcctccctggccatcagtgggctccagtctgaggatgaggctgattattactgtgcagcatgggatgacagcctgaatggttgggtgttcggcggagggaccaagctgaccgtccta

SEQ ID NO: 630 - DNA, 330 bp, Homo Sapien
caggctgtgctgactcagccgtcctccgtgtctgggacccccggccagagggtcaccatgtcttgttctggaggcaggtccaacatcggaagtaatgctgtcaactggtaccaacagttcccaggaacggcccccaaactcctcatgtataatactaatcagcggccctcaggggtccctggccgattctctggctccaagtctggcgcctcagcctccctggccatcagtggcctccagtctgatgatgaggctgattattactgttcgtcttgggatgacagcctcaatggtctggagttcggcggagggaccaagctgaccgtccta

SEQ ID NO: 631 - DNA, 330 bp, Homo Sapien
cagtctgtcgtgacgcagccgccctcagcgtctgggacccccgggcagagggtcaccatctcttgttctggaagcagctccaacatcggaagtaatactgtaaactggtaccagcagctcccaggaacggccctcaaactcctcatctatagtaataatcagcggccctcaggggtccctgaccgattctctggctccaagtctggcacctcagcctccctggccatcagtgggctccagtctgaggatgaggctgattattactgtgcagcatgggatgacagcctgaatggttatgtcttcggaactgggaccaagctgaccgtccta

SEQ ID NO: 632 - DNA, 333 bp, Homo Sapien
caggctgtgctgactcagccgtcctcagtgtctggggccccagggcagagggtcactatctcctgtactgggagcagctccaacatcggggcaggttatgatgttcactggtaccggcagcttccaggaacagcccccaaactcctcttgtatggtaatgacaatcgaccctcaggggtccctgaccgattctctggctccaagtctggcgcctcagcctccctggccatcacagggctccgggctgacgatgaggctgattattactgccagtcctatgacagcagcctgagtggttcggtgttcggcggagggaccaaggtcaccgtccta

SEQ ID NO: 633 - DNA, 333 bp, Homo Sapien
caggctgtgctgactcagccgtcctcagtgtctggggccccagggcagagggtcaccatctcctgcactgggagcagctccaacatcggggcaggttatgatgtacactggtaccagcagcttccaggaacagcccccaaactcctcatctatggtaacagcaatcggccctcaggggtccctgaccgattctctggctccaagtctggcacctcagcctccctggccatcactgggctccaggctgaggatgaggctgattattactgccagtcctatgacagcagcctgagtggttcggtattcggcggagggaccaaggtcaccgtccta

SEQ ID NO: 634 - protein, 330 aa, Homo Sapien
CAGTCTGTGCTGACGCAGCCGCCCTCAGCGTCTGGGACCCCCGGGCAGGGGGTCACCATCTCTTGTTCTGGAAGCAGCTCCAACATCGGAAGGAATTCTGTAAACTGGTACCAACAACTCCCAGGAACGGCCCCCAAACTCCTCATCTATGGTGATAATCAGCGGCCCTCAGGGGTCCCTGACCGATTCTCTGGCTCCAAGCCTGGCACCTCGGCCTCCCTGGCCATCAGTGGGCTCCAGTCTGACGATGAGGCTCATTATTACTGTGCAGCATGGGATGACAGCCTGAATGGTTGGGTGTTCGGCGGAGGGACCAAGGTCACCGTCCTA

SEQ ID NO: 635 - DNA, 333 bp, Homo Sapien
caggctgtgctgactcagccgtcctcagtgtctggggccccagggcagagggtcaccatctcctgcactgggagcaggtccaacatcggggcaggttatgatgtacactggtaccagcagcttccaggaacagcccccaaactcctcatctatggtaacagcaatcggccctcaggggtccctgaccgattctctggctccaagtctggcacctcagcctccctggccatcactgggctccaggctgaggatgaggctgattattactgccagtcctatgacagcagcctgagtggttcggtgttcggcggagggaccaagctgaccgtccta

SEQ ID NO: 636 - DNA, 330 bp, Homo Sapien
cagtctgtgctgactcagccaccctccgcgtctgggacccccggccagagggtcaccatctcttgttctggaagcagctccaacatcggaagtaatactgtaacctggtaccagcaggtcccaggaacggcccccaaagtcctcatctatactaatattcagcggccctcaggggtccctgaccgattctctggctccaagtctggcacctcagcctccctggccatcagtgggctccagtctgaggatgagagtgattatttctgtgcagcatgggatgacagcctgaatggtgtggtttttggcggagggaccaagctgaccgtccta

SEQ ID NO: 637 - DNA, 330 bp, Homo Sapien
tcctatgagctgactcagccaccctcagcgtctgggacccccgggcagagggtcaccatctcttgttctggaagcagctccaacatcggcagtaatcctgtaaactggtaccagcacctcccaggaacggcccccaaactcctcatctatagtgatagtcagcggccctcaggggtccctgaccgattctctggctccaagtctggcacctcagcctccctggccatcagtgggctccagtctgaggatgaggctgattattactgtgcaacatgggatgacagcctgagtggttgggtgttcggcggagggaccaagctgaccgtccta

SEQ ID NO: 638 - DNA, 330 bp, Homo Sapien
cacgttatactgactcaaccgccctcagcgtctgggacccccgggcagagggtcaccatctcttgttctggaggcggctccaacatcggaagtaatactgtaaactggtaccagcacctcccaggaacggcccccaaactcctcatctataataatgatcagcggccctcaggggtccctgaccgattctctggctccaagtctggcacctcagcctccctggccatcagtgggctccagtctgaggatgaggctgattattactgtgcagcatgggatgacagcctgaatggttggctgttcggcggagggaccaagctgaccgtccta

SEQ ID NO: 639 - DNA, 330 bp, Homo Sapien
cagtctgtgctgactcagccaccctcagtgtcagggacccccgggcagagggtcaccatctcttgttctggaagcagctccaacatcggaaatgatgttgtaaactggtaccaacaactcccaggaacggcccccaaactcctcatctataatgattatcagcggccctcaggggtctctgaccgattctccggctccaagtctggcacctcagcctacctggccatcagtgggctccagtctgaagatgaggctgattatcactgtgcagtatgggatgacagcctggatggttgggtgttcggcggagggaccaagctgaccgtccta

SEQ ID NO: 640 - DNA, 330 bp, Homo Sapien
cagcctgtgctgactcagcccccctcagcgtctgggacccccgggcagagggtcaccatctcttgttctggaagcagctccaacatcgcaagtaattctgtatactggtaccagcagctcccaggaacggcccccaaactcctcatctataggaataatcagcggccctcaggggtccctgaccgattctctggctcccagtctggcgcctcagcctccctggccatcagtgggctccggtccgaggatgaggctgattattactgtgcagcatgggatgacaacctctatggtgtggtattcggcggagggaccaagctgaccgtccta

SEQ ID NO: 641 - DNA, 333 bp, Homo Sapien
ctgcctgtgctgactcagcccccctcagcgtctgggacccccgggcagagggtcaccatctcttgttctggaagtagctccaacatcggaaataattatgtatattggtatcaacaactcccaggaacggcccccaaactcctcatctacaggaataatcagcggccctcaggggtccctgaccgattctctgcctccaagtctggcacctcagcctccctggtcatcagtggcatccggtccgaggatgaggctgaatattactgtggaggatgggatgacagcctgagtggtcaggtggttttcggcggagggaccaagctgaccgtccta

SEQ ID NO: 642 - DNA, 330 bp, Homo Sapien
caggctgtgctgactcagccgtcctcagcgtctgggacccccgggcagagggtcaccatctcttgttctggaagcagctccaacatcggaagtaatactgtaaactggtaccagcagctcccaggaacggcccccaaactcctcatctatgctactaatcagcggccctcaggggtccctgaccgattctctggctccgagtctggcacctcagcctccctggccatcagggggctccagtctgaggatgaggctgattattactgtgcagcatgggatgacagcctgaatgggaaagtattcggcggagggaccaaggtcaccgtccta

SEQ ID NO: 643 - DNA, 330 bp, Homo Sapien
cagtctgtgttgacgcagccgccctcagtgtctggggcccccgggcagagggtcaccatctcttgttctggaagcacctccaacatcggaggcaatcctgtgacctggtaccagcaattcccaggaacggcccccaaactcctcgtctatcgtgataatcagcggccctccggggtcgctgaccgattctctggctccaggtctggcacctcagcctccctggccatcagtggcctccagtctgaggatgaggctgatttttactgtgcatcatgggatgacagcctgggtggtgtggtgttcggcggtgggaccaagctgaccgtccta

SEQ ID NO: 644 - DNA, 330 bp, Homo Sapien
caggctgtgctgactcagccgtcctcagagtctgggacccccgggcagagggtcaccatctcttgttctgggaccacctccaacatcggagataatactgtcacctggtaccagcagctcccaggaacggcccccaaactcctcatctatagtaacactcagcggccctcaggggtccctgcccggttctctggctccaagtctggcacctcagcctccctggccatcagtggactccagtctggggatgaggctgattattactgtgcggcgtgggatgacagtcggaatggttatgtcttcggaactgggaccaagctgaccgtccta

SEQ ID NO: 645 - DNA, 330 bp, Homo Sapien
caggctgtgctgactcagccgtcctcagcgtctgggacccccgggcagagggtcaccatctcttgttctggaagcagctccaacatcggaactaattatgtctactggtaccagcatctcccaggaatggcccccaaactcctcctctatagtaataatcagcggccctcaggggtccctgaccgattctctggctccaagtctggcccctcagcctccctggccatcagtgggctccggtccgaggatgaggctgattattactgtgctgcttgggatgacagcctgagtggtctggtgttcggcggagggaccaagctgaccgtccta

SEQ ID NO: 646 - DNA, 330 bp, Homo Sapien; identical to SEQ ID NO: 131

SEQ ID NO: 647 - DNA, 333 bp, Homo Sapien
caggctgtgctgactcagccgtcctcagtgtccggggccccagggcagagggtcaccatctcctgcactgggagcagctccaacatcgggtcaccttatgatgtaaactggtaccagcagtttccaggaacagcccccaaactcctcatctatggtaacattaatcggccctcaggagtccctgatcgattctctggctccaagtctggcacctcagcctccctggccatcactgggctccaggctgaggacgaggctgattattactgccagacctatgacagcaccctgaacggtgcggttttcggcggcgggaccaagctgaccgtccta

SEQ ID NO: 648 - DNA, 330 bp, Homo Sapien
cagtctgtgctgactcagccaccctcagcgtctgggacccccgggcagagggtcaccatctcttgttctggaagcagctccaacatcggaggtaattatgtatactggtaccagcagctcccaggaacggcccccaaactcctcatctataggagtaatcagcggccctcaggggtccctgaccgattctctggctccaagtctggcacctcagcctccctggccatcagtgggctccggtccgaggatgaggctgattattactgtgcagcatgggatgacagcctgcacggtgtgatattcggcggagggaccaagctgaccgtccta

SEQ ID NO: 649 - DNA, 330 bp, Homo Sapien
caggctgtgctgactcagccgtcctcagcgtctgggacccccgggcagagggtcaccatctcttgtcctggaagcagctccaacatcggaagtaatactgtaaactggtaccagcagctcccaggaacggcccccaaactcctcatctatactaataatcagcggccctcaggggtccctgaccgattctctgcctccaagtctggcacctcagcctccctggccatcagtgggctccagtctgaggatgaggctgattattactgtgcagcatgggatgacagcctgaatggttatgtcttcggaactgggaccaagctgaccgtccta

SEQ ID NO: 650 - DNA, 330 bp, Homo Sapien
cagtctgtgctgactcagccaccctcagcgtctgggacccccgggcagagggtcaccatctcttgttctggaagcagctccaacatcgggagtaacactgtaaactggtaccagcgactcccaggagcggccccccaactcctcatctacaataatgaccagcggccctcagggatccctgaccgattctctggctccaagtctggcacctcgggctccctggtcatcagtgggctccagtctgaagatgaggctgattactactgtgcgtcatgggatgacagtctgaatggtcgggtgttcggcggagggaccaagctgaccgtccta

SEQ ID NO: 651 - DNA, 330 bp, Homo Sapien
caggctgtgctgactcagccgtcctcagcgtctgggaccgccgggcagagggtcaccatctcttgttctggaagcaactccaacatcggaagtaatactgtaaactggtaccaacaactcccaggaacgacccccaaactcctcatctatagtaataatgagcggccctcaggggtccctgaccgattctctggctccaagtctggcacttcagcctccctggccatcagtgggctccagtctgacgatgaagctgattattactgtgcagcatgggatgacagcctgaatggttatgtcttcggaactgggaccaaggtcaccgtccta

SEQ ID NO: 652 - DNA, 330 bp, Homo Sapien
cagtctgtgttgacgcagccgccctcagcgtctgggacccccgggcagagggtcagcatctcttgttctggaagcagctccaacatcggaagcaattatgtttactggtaccagcaactcccaggaacggcccccaaagtcctcgtctataggaataatcagcgaccctcaggggtctctgaccgcttctctggctccaagtatggcacctcagcctccctggccatcagtgggctccggtccgaggatgaggctgattattactgtggatcatgggatgacagcctgagtggtgtggtattcggcggagggaccaaggtcaccgtccta

SEQ ID NO: 653 - DNA, 330 bp, Homo Sapien
cagtctgtgctgactcagccaccctcagcgtctgggacccccgggcagagggtcaccatctcttgttctggaagcagctccaatatcggaagtaattatgtatactggtaccagcagctcccaggaacggcccccaaactcctcatctataggaataatcagcggccctcaggggtccctgaccgattctctggctccaagtctggcacctcagcctccctggccatcagtgggctccggtccgaggatgaggctgattattactgtgcagcatgggatgacagcctgagtggcgtggtattcggcggagggaccaaggtcaccgtccta

SEQ ID NO: 654 - DNA, 330 bp, Homo Sapien
cagtctgtcgtgacgcagccgccctcagcgtctgggacccccgggcagagggtcaccatctcttgttctggaagcagctccaacatcggaagtaattatgtatactggtaccagcagctcccaggaacggcccccaaactcctcatctataggaataatcagcggccctcaggggtccctgaccgattctctggctccaagtctggcacctcagcctccctggccatcagtgggctccggtccgaggatgaggctgattattactgtgcagcatgggatgacagcctgagtggtgtggtattcggcggagggaccaagctgaccgtccta

SEQ ID NO: 655 - DNA, 330 bp, Homo Sapien; identical to SEQ ID NO: 130

SEQ ID NO: 656 - DNA, 330 bp, Homo Sapien
cagtctgtcgtgacgcagccgccctcactgtctgcggccccaggacaaagggtcaccatctcctgctctggaagccactccaacattggtaacttttatgtgtcgtggtaccagcaagtcccaggagcagcccccaaactcctcatttatgacaataatgagcgaccctcagggattcctgaccgattctctggctccaagtctggcacgtctgccaccctagacatcaccggactccagactggggacgaggccgattattactgctcaacctgggatcgcagcctcagtgcttctgtcttcggaagtgggaccaagctgaccgtccta

SEQ ID NO: 657 - DNA, 330 bp, Homo Sapien
cagtctgtgctgactcagccaccctccgcgtccgggtctcctggacggtcagtcaccatctcctgcactggaaccagcagggacgttggtgcttataactatgtctcctggtaccaacaacacccaggcgaagcccccaaactcctgatttctgaggtcactaagcggccctcaggggtccctgctcgcttctctgcctccaagtctggcaacacggcctccctgaccatctctggactccaggctgaagatgagggtgattattactgcagctcatatgcaggcagcgacagttgggtgttcggcggagggaccaagctgaccgtccta

SEQ ID NO: 658 - DNA, 330 bp, Homo Sapien
aattttatgctgactcagccccactctgtgtcggagtctccggggaagacggtaaccatctcctgcacccgcagcagtggcagcattggcagcagctacgtgcagtggtaccagcagcgcccgggcacttcccctgtcaccatcatctatgaggatagccaacggccctctggggtccctgatcgattctctgggtccatcgacaactccgccaattctgcctccctcaccatctctggactgaagactgaggacgaggctgactactactgtcagtcttatgatgccaacaatcgggtgttcggcggagggaccaagctgaccgtccta

SEQ ID NO: 659 - DNA, 330 bp, Homo Sapien
cagtctgtgctgactcagccaccctcagcgactgggacccccgggcagacagtcagcatctcttgctctggaggcaactccaacatcggaagtaattatgtttcctggtatcagcaactcccaggaacggcccccaaactcctcatctatagtaataatcagcggccctcaggggtccctgaccgattctctggctccaagtctggcacctcagcctccctggccatcagtgggctccagtctgaggatgaggctgattattactgtgcagcatgggatgacagcctgaatgggcatatcttcggaactgggaccaagctgaccgtccta

SEQ ID NO: 660 - DNA, 330 bp, Homo Sapien
cagtctgtgttgacgcagccgccctcagcgtccgggacccccgggcagagggtcaccatctcttgttctggaagcagctccaacatcggagctaattatgtatactggtaccagcagctcccaggaacggcccccaaactcctcatttataaaaatgatcagcggccctcaggggtccctgaccgattctctggctccaagtctggcacctcagcctccctggccatcagtgggctccggtccgaggatgaggctgattattactgtgcagcatgggatgacagcctgagtggtctggtattcggcggagggaccaaggtcaccgtccta

SEQ ID NO: 661 - DNA, 330 bp, Homo Sapien
cagtctgtgttgacgcagccgccctcagcgtctgggacccccggacagagggtcaccatctcttgttctggaagcaactccaacatcggaagcaatactgtgaactggtaccaacagctcccaggaacggcccccaaagtcctcatctatggtaatcttcagcggccctcaggggtccctgaccgattctctggctccaagtctggcacctcagcctccctggccatcagtgggctccagtctgaggatgaggctgattattactgtgcaacttgggatgacagcctgaatggttttgtcttcggaactgggaccaagctgaccgtccta

SEQ ID NO: 662 - DNA, 330 bp, Homo Sapien
cagtctgtgctgactcagccaccctcagcgtctgggacccccgggcagagggtcaccatctcttgttctggaagcagctccaacatcgggagtaacactgtaaactggtaccagcgactcccaggagcggccccccaactcctcatctacaataatgaccagcggccctcagggatccctgaccgattctctggctccaagtctggcacctcaggctccctggtcatcagtgggctccagtctgaagatgaggctgattactactgtgcgtcatgggatgacagtctgaatggtcgggtgttcggcggagggaccaagctgaccgtccta

SEQ ID NO: 663 - DNA, 330 bp, Homo Sapien
cagtctgtgttgacgcagccgccctcggtgtctgaagcccccaggcagagggtcaccatctcctgttctggaagcagctccaacatcggaaataatgctgtaaactggtaccagcagctcccaggagaggctcccaaactcctcatctattatgatgatctgctgccctcaggggtctctgaccgattctctggctccaagtctggcagttcagcctccctggccatcagtgggctccaggctgaggatgaggctgattattactgtgctacatgggatgacagcctgaatgcttgggtgttcggcggagggaccaaggtcaccgtccta

SEQ ID NO: 664 - DNA, 330 bp, Homo Sapien
ctgcctgtgctgactcagccaccctcggtgtctgaagcccccaggcagagggtcaccatctcctgttctggaagcagcttcaacatcggaaataatgctgtaaactggtaccagcagctcccaggaaaggctcccaaactcctcatctattatgatgatctgctgccctcaggggtctctgaccgattctctggctccaagtctggcacctcagcctccctggccatcagtgggctccagtctgaggatgaggctgattattactgtgcagcatgggatgacagcctgaatgccgtggtattcggcggagggaccaaggtcaccgtccta

SEQ ID NO: 665 - DNA, 330 bp, Homo Sapien; identical to SEQ ID NO: 184

SEQ ID NO: 666 - DNA, 330 bp, Homo Sapien
cagtctgtcgtgacgcagccgccctcagcgtctgggacccccgggcagagggtcaccatctcttgttctggaagcagctccaacatcggaagtaatactgtaaactggtaccagcagctcccaggaacggcccccaaactcctcatctatagtaataatcagcggccctcaggggtccctgaccgattctctggctccaagtctggcacctcagcctccctggccatcagtgggctccagtctgaggatgaggctgattattactgtgcagcatgggatgacagcctgaatggtggggtgttcggcggagggaccaagctgaccgtccta

SEQ ID NO: 667 - DNA, 333 bp, Homo Sapien
caggctgtgctgactcagccgtcctcagtgtctggggcccccggccagagggtcatcatctcctgcactggaaccagctccaacaccggggcaggctattatgttaattggtatcaacaacttccgggagcagcccccaaagtcctcatctttggtaacgacaatcggccctcaggggtccctgaccggttctctggcgccaagtctggcacctcagcctccctggccatcactgggctccaggctgaagatgaggctgactattattgccagtcgtacgaccgcagcctgagtggttgggtcttcggcggagggaccaagctgaccgtccta

SEQ ID NO: 668 - DNA, 324 bp, Homo Sapien
tcttctgagctgactcaggaccctgctgtgtctgtggccttgggacagacagtcagaatcacatgccaaggagacagcctcagaagcaattatccaagctggtaccagcagaagccaggacaggcccctctacttgtcatctatagtgaaaacaggcggccctcagggatcccggaccgattctctgcctccaggtcaggaaacacagcttccttgaccatcactggggctcaggcggaagatgaggctgactattactgtcactcccggggcagcagtggtaaccataaagtgttcggcggagggacccagctcaccgtttta

SEQ ID NO: 669 - DNA, 321 bp, Homo Sapien
gacatcgtgatgacccagtctccttccaccctgtctgcatctgtaggagacagagtcaccatcacttgccgggccagtcagggtattagtagctggttggcctggtatcagcagaaaccagggagagcccctaaggtcttgatctataaggcatctactttagaaagtggggtcccatcaaggttcagcggcagtggatctgggacagatttcactctcaccatcagcagtctgcaacctgaagattttgcaacttactactgtcaacagagttacagtaccccgtggacgttcggccaagggaccaagctggagatcaaa

SEQ ID NO: 670 - DNA, 321 bp, Homo Sapien; identical to SEQ ID NO: 669

SEQ ID NO: 671 - DNA, 330 bp, Homo Sapien
cagcctgtgctgactcagcccccctcagcgtctgggacccccgggcagagggtcaccatctcttgttctggaagcagctccaacctcggaattaatactgtaaactggtaccagcaagtcccaggaacggcccccaaactcctcatctatagtgatcatcagcggccctcaggggtccctgaccgattctctggctccaagtctgccacctcagcctccctggccatcagtgggctccagtctgaggatgaggctgattattactgtgcagcatgggatgacagcctgaatggctgggtgttcggcggagggaccaagctgaccgtccta

SEQ ID NO: 672 - DNA, 330 bp, Homo Sapien
cagtctgtgctgacgcagccgccctcagcgtctgggacccccgggcagagggtcaccatcccttgttctggaagcagctccaacatcggaagtaattatgtctactggtatcagcagctcccaggaacggcccccaaactcctcatctataggaataatcagcggccctcaggggtccctgaccgattctctggctccaagtctggcacctcagcctccctggccatcagtggactccggtccgaggatgaggctgattattactgtgcagcatgggatgacagcctgagtggtctggtgttcggcggagggaccaaggtcaccgtccta

SEQ ID NO: 673 - DNA, 330 bp, Homo Sapien
tcctatgtgctgactcagccaccctcagcgtctgggacccccgggcagagggtcaccgtctcttgttctggaagcagctccagcatcggaagtaatactgtaaactggtaccagcagctcccaggaacggcccccaagctcctcatctatagtaataatcagcggccctcaggggtccctgaccgattctctggctccaagtctggcacctcagcctccctggccatcagtgggctccagtctgaggatgaggctgattattactgtgcagcatgggatgacagcctgaatggtctggtattcggcggagggaccaagctgaccgtccta

SEQ ID NO: 674 - DNA, 330 bp, Homo Sapien
cagtctgtgttgacgcagccgccctcggtgtctgtggccccaggacagacggccacactttcctgtgtgggagacgccattgagagaaaaagtgttcactggtaccaacagaggccaggccaggccccggtgctggtcgtccatgatgatagcgaccggccctcagggatccctgaccgaatctctggctccaactctgggaacacggccaccctgaccatcaccagggtcgaagtcggggatgaggccgactacttctgtcaggtgtgggacactagtagtggtcatgacgctgtggtcttcggcggagggaccaagctgaccgtccta

SEQ ID NO: 675 - DNA, 324 bp, Homo Sapien; identical to SEQ ID NO: 198

SEQ ID NO: 676 - DNA, 330 bp, Homo Sapien
cagtctgtgctgacgcagccgccctcggtgtctggggcccccaggcagagggtcaccatctcctgttctggaagcagctccaacatcgaaaataatattgtaaactggtaccagcaactcccaggagaggctcccaaactcctcatctattatgataatctgctgccctcaggggtctctgaccgattctctggctccaagtctggcacctccgcctccctggccatcagtggcctccagtctggggatgaggctgattattactgtgcagcatgggatgacagcctgaaggctgtggtgttcggcggagggaccaagctgaccgtccta

SEQ ID NO: 677 - DNA, 330 bp, Homo Sapien
cagcctgtgctgactcagccaccctcagcgtctgggacccccgggcagagggtcaccatctcttgttctggaagctactccaacatcggaagtaattatgtctactggtaccagcagttcccaggaacggcccccaaactcctcatctatacgaataatcagcggccctcaggggtccctgaccgattctctggctccaagtctggctcctcagcctcccttgccatcagtgggctccggtccgaggatgaggctgattattactgtgcagcatgggatgacagtgtgggtgtcctgttattcggcggggggaccaaggtcaccgtccta

SEQ ID NO: 678 - DNA, 330 bp, Homo Sapien
cagtctgtgctgactcagccaccctcagcgtctgggacccccgggcagagagtcaccatctcttgttctggaagcacctccaacatcggaaagaatactgtaaactggtaccagcaactcccagcaacggcccccaaactcctcatctatagtgataatcagcggccctcaggggtccctgaccgattctctggctccaagtctggcacctcagcctccctggccatcagtgggctccagtctgaagatgagtctgattattactgtgcagcatgggatgacagcctggatggcctggtattcggcggagggaccaagctgaccgtccta

SEQ ID NO: 679 - DNA, 330 bp, Homo Sapien
cagtctgtgctgacgcagccgccctcagtgtctgcgaccccaggacagaaggtcaccatctcctgctctggaagcaactccaacattgggaataattatgtgtcctggtatcaacaactcccaggaacagcccccaaacttctcatttatgacagtgatcagcgacccgcagggattcctgaccgattctctggctccaagttaggcacgtcagccaccctgggcatcaccggactccagactggggacgaggccgattattactgcgcaacatgggatgccggcctgagtgttctgattttcggcggagggaccaagctgaccgtccta

SEQ ID NO: 680 - DNA, 330 bp, Homo Sapien
cagcctgtgctgactcagcccccctcagcgtctgggacccccgggcagagggtcgccatctcttgttctggaagcagctccaacatcggaagtaatcctgtaaactggtaccaacaactcccaggaacggcccccaagctcctcatctatggtgataatcagcggccctcaggggtccctgaccgattctctggctccaagtctggcacctcagcctccctggccgtcagtgggctccagtctgaggatgaggctgattatttctgtgcagcatgggatgacagcctgaatggtgtggtcttcggcggagggaccaagctgaccgtccta

SEQ ID NO: 681 - DNA, 336 bp, Homo Sapien
caggctgtgctgactcagccgtcctcagtgtctggggccccagggcagagggtcaccatctcctgcactgggagcagctccaacatcggggcaggcaatgatgtacactggtatcggcagtttccaggaacggcccccaaactcctcatctatggaaataacaagcggccctcaggggtctctgaccgattctctggctccaagtctggcacctcagcctccctggccatcactgggctccaggttgaggatgaggctgattattactgccagtcctatgacagcagcctgggtgggtcggacgttttcggcggagggaccaagctgaccgtccta

SEQ ID NO: 682 - DNA, 330 bp, Homo Sapien
cagtctgtgctgactcagccaccctcagcgtctgggacccccgggcagagggtcaccatctcctgttctggaagcagctccaacatcggaggtaatactgtaaactggtaccagcagctcccaggaacggcccccaaactcctcatctatggtactaatcagcggccctcaggggtccctgaccgattctctggctccaagtctggcacctcagcctccctggccatcagtgggctccagtctgaggatgaggctgattattactgtgcagcatgggatgacttcctgaatggtaaggtattcggcggagggaccaagctgaccgtccta

SEQ ID NO: 683 - DNA, 330 bp, Homo Sapien; identical to SEQ ID NO: 188

SEQ ID NO: 684 - DNA, 330 bp, Homo Sapien
tcctatgtgctgactcagccaccctcaacgtctggggcccccgggcagagggtcaccatctcttgttctgggagcagctccaacatcggaagtaatggtgttaactggtaccaccacctcccaggaacggcccccaaactcctcatctacagtaattttcatcggccctcaggggtcccggaccgattctctggctccaagtctggcacctcagccaccctggccatcagtgggctccagtctgaggatgaggctgattattactgtgcagcatgggatgacagcctgaatgattatgtcttcggagttgggaccaaggtcaccgtccta

SEQ ID NO: 685 - DNA, 330 bp, Homo Sapien
cagtctgtgctgactcagccaccctcagcgtctgggacccccggccagagggccaccatctcttgttctggaagcggctccaacatcggaagaaatgctgttaactggttccagcagctcccaggagcggcccccaaactcctcatctatagtaatattcaccggccctcaggggtcccggaccgaatctctggctccaagtctggcacctcagccaccctggccatcagtgggctccagtctgaggatgaggctgattattactgtgcaacatgggatgacagccttaatgattatgtcttcggaactgggaccaagctgaccgtccta

SEQ ID NO: 686 - DNA, 333 bp, Homo Sapien
caggctgtgctgactcagccgtcctcagtgtctggggccccagggcagagggtcaccatctcctgcactgggaccggctccaacatcggggcaggttatgatgtacactggtaccagcagcttccaggaactgcccccaaactcctcatctatgctaacaccaatcggccctcaggggtccctgaccgattctctggctccaagtctggcacctcagcctccctggccatcactgggctccaggctgaggatgaggctgattattactgccagtcctatgacagcagcctgagtggttcggtgttcggcggagggaccaaggtcaccgtccta

SEQ ID NO: 687 - DNA, 330 bp, Homo Sapien
tcctatgagctgactcagccaccctcagcgtctgggacccccgggcagagggtcaccatctcttgttctggaaccagctccaacatcggaattaattatgtatactggtatcagcagctcccaagaacggcccccaaactcctcatctattataataatcaacggccctcaggggtccctgaccgattctctggctccagatctggcacctcagcctccctggccatcagtgggctccggtccgaggatgaggctgattattactgtgcagcatgggatgacagcctgagtggtctagtcttcggaactgggaccaagctgaccgtccta

SEQ ID NO: 688 - DNA, 330 bp, Homo Sapien
cagtctgtgctgactcagccaccctcagcgtctgggacccccggacagagggtcaccatctcttgttctggaagcagctccaacatcggaagtaatcctgtcaactggtaccagcagctcccaggatcggcccccaaactcctcgtctatagtgatgatcagcggccctcaggggtccctgaccgattctctggctccaagtctggagcctcagcctccctggccatcagtgggctccagtctgaggatgagtctgattattactgtgcagcatgggatgacagccagaatgctgtggttttcggcggagggaccaaggtcaccgtccta

SEQ ID NO: 689 - DNA, 330 bp, Homo Sapien
ctgcctgtgctgactcagccaccctcagcgtctgggacccccgggcagagggtcatcatctcttgttctggaagcagctccaacatcggaagtaattatgtatactggtaccagcagctcccaggaacggcccccaaactcctcatctataggaataatcagcggccctcaggggtccctgaccgattctctggctccaagtctggcacctcagcctccctggccatcagtgggctccggtccgaggatgaggctgattatcactgtgcagcatgggatgacagcctgagtggggtggtattcggcggagggaccaagctgaccgtccta

SEQ ID NO: 690 - DNA, 330 bp, Homo Sapien
tcctatgagctgactcagccaccctcagcgtctgggacccccgggcagagggtcaccatctcttgttctggaagcggctccaacatcgggaagaatactgtaaactggtatcagcagctcccaggggcggcccccaaactcctcatctatagtaataatgagcgtccctcaggggtccctggccggttctctggctccaagtctggcacctcagcctccctggccatcagtgggctccagtctgaggatgagactgattattattgtgcagcctgggatgacagcctgaatgatatggtcttcggcggagggaccaaggtcaccgtccta

SEQ ID NO: 691 - DNA, 336 bp, Homo Sapien
caggctgtgctgactcagccgtcctcagtgtctggggccccagggcagaggatcaccatctcctgcactgggaccagctccaacatcggggcaggttatgatgtagagtggtaccagcaccttccaggaacagcccccaaactcctcatctatcgtaacagcaatcggccctcaggggtccctgatcgattctctgcctccaagtctggcacctcagcctccctggtcatcactggactccaggctgaagatgaggctgattattactgccagtcctatgacaccaggctgagtgattctgtgattttcggcggagggaccaagctgaccgtccta

SEQ ID NO: 692 - DNA, 324 bp, Homo Sapien
tcctatgagctgactcagccaccctcggtgtcagtggccccagggcagacggccaggattacctgtgggggagaaaacattggaactaaaagtgtgcactggtaccagcagaagtcaggccaggcccctgtgctagtcatctatgaggacaagaaacgaccctccgggatccctgacagattctctggctccagctcagggacaatggccaccttgactatcactggggcccaggtggacgatgaagctgactactactgttactcagcagacaacactggtgatcagagaatgttcggcggagggaccaagctgaccgtccta

SEQ ID NO: 693 - DNA, 330 bp, Homo Sapien
caggctgtgctgactcagccgtcttcagcgtctgggacccccgggcagagggtcatcatctcttgttctggaagcagctccaacatcggaaagtacattgttaattggtatcagcaactcccaggagcggcccccaaactcctcatctatacttataatgagcggccctcaggggtccctgcccgcttctctggctccacgtctggcacgtcagcctccctggccatcactgggctccagtctgaagatgaggctgattattattgtgcatcatgggatgacagcctgaatgtcgtggtcttcggcggagggaccaagctgaccgtccta

SEQ ID NO: 694 - DNA, 333 bp, Homo Sapien
cagtctgtcgtgacgcagccgccctcagcgtctgggacccccgggcagagggtcaccatctcttgttctggaagcagctccaacatcggaagtaatactgtaaactggtaccagcagctcccaggaatggcccccaaactcctcatctatagtaataatcagcggcccccaggggtccctgaccgattctctggctccaagtctggcacctcagcctccctggccatcagtgggctccagtctgaggatgaggctgattattactgtgcagcatgggatgacagcctgaatgggaattgggttttcggcggagggaccaagctgaccgtccta

SEQ ID NO: 695 - DNA, 330 bp, Homo Sapien
cagtctgtgctgactcagccaccctcagcgtctgggacccccgggcagagggtcaccatctcttgttctggaagcagctccaacatcggaagtaattatgtatattggtaccagaagttcccaggaacggcccccaaactcctcatctatacgaataatcagcggccctcaggggtccctgaccgattttctggctccaagtctggcacctcagcctccctggccatcagtgggctccggtccgaggatgaggctgattattactgtgcagcatgggatgacagcctgagtggtgtggtattcggcggagggaccaaggtcaccgtccta

SEQ ID NO: 696 - DNA, 333 bp, Homo Sapien
cagtctgtcgtgacgcagccgccctcagtgtctggggccccagggcagagggtcaccatctcctgcactgggagcagctccaacatcggggcaggttatgatgtacactggtaccagcagcttccaggaacagcccccaaactcctcatctatggtaacagcaatcggccctcaggggtccctgaccgattctctggctccaagtctggcacctcagcctccctggccatcactgggctccaggctgaggatgaggctgattattactgccagtcctatgacagcagcctgagtggttcggtgttcggcggagggaccaagctgaccgtccta

SEQ ID NO: 697 - DNA, 330 bp, Homo Sapien
cagtctgtgttgacgcagccgccctcagcgtctgggacccccgggcagagggtcgccatctcttgttctggcagccactccaacatcagaagtaatgatgtttattggtaccagcagtttccaggaacggcccccaaactcctcatctatagtaatgatcagcggccctcaggggtctctgaccgattcgctggctccaagtctggcacctcagcctccctggccatcagcggactccggtccgaggatgagtctgattattattgtgcaacatgggatgacagcctgagtggcgtggtcttcggcggagggaccaagctgaccgtccta

SEQ ID NO: 698 - DNA, 333 bp, Homo Sapien
cagtctgtgctgactcagccaccctcagcgtctgggacccccgggcagagggtcaccatctcttgttctggaagcttctccaacatcggaagtaataatgtatactggtaccagcagctcgcaggaacggcccccaaactcctcatctataggaataatgagcggccctcaggggtccctgaccgattctctggctccaagtctggcacctcagcctccctggccatcagtgggctccggtccgaggatgaggctgattattactgtgcagtacgggatgacagcctgagtggtcattatgtcttcggatctgggaccaaggtcaccgtccta

SEQ ID NO: 699 - DNA, 330 bp, Homo Sapien
cagtctgtgttgacgcagccgccctcagcgtctgggacccccgggcagagggtcaccatctcctgttctggaagcagctccaatatcggaagtaattctgtatactggtaccagcagttcccaggaacggcccccaaactcctcatctataggaataatcagcggccctcaggggtccctgaccgattctctggttccaagtctgacacctcagcctccctggccatcagtgggctccggtccgaggatgaggctgattattactgtgcaacatgggatgacagcctgagtggtgtggtattcggcggagggaccaagctgaccgtccta

SEQ ID NO: 700 - DNA, 330 bp, Homo Sapien
caggctgtgctgactcagccgtcctccgtgtctgggacccccggccagagggtcaccatgtcttgttctggaggcaggtccaacatcggaagtaatgctgtcaactggtaccaacagttcccaggaacggcccccaaactcctcatgtataatactaatcagcggccctcaggggtccctggccgattctctggctccaagtctggcgcctcagcctccctggccatcagtggcctccagtctgatgatgaggctgattattactgttcgtcttgggatgacagcctcaatggtctggagttcggcggagggaccaagctggagatcaaa

SEQ ID NO: 701 - DNA, 324 bp, Homo Sapien
cagtctgtgctgactcagccaccctcagtgtccgtgtccccaggacagacagccagcatcacctgctctggagataaattgggagataaatatactttctggtatcagcagaagccaggccagtcccctgtgctgatcatctatcaagataccaagcggccctcagggatcccagagcgattctctggctccaactctgggaacacagccactctgaccatcagcgggacccaggctatggatgaggctgactattactgtcaggcgtgggatagtaatactgatcatgtgatattcggcggagggaccaagctgaccgtccta

SEQ ID NO: 702 - DNA, 345 bp, Homo Sapien
caggctgtgctgactcagccgtcttccctctctgcatctcctggagcatcagccagtctcacctgcaccttgcgcagtgacatcaatcttgagacctccaggatttattggtttcaacaaaagccagggagtcctccccgctatctcttgaggtaccagtcagactcagataataacctggactctggagtccccagccgcttctctggatccaaagatgcttcggccaacgcaggaattttgctcatctctggggtccagtctgaggatgaggctgattatcattgtatgatttggcacagcggcggttcggttttcggcggagggaccaaggtcaccgtccta

SEQ ID NO: 703 - DNA, 330 bp, Homo Sapien
cagtctgtgttgacgcagccgccctcagcgtctgggacccccgggcagagggtcaccatctcttgttctggaaacaggtccaacatcggaagtaatactgtaaactggtaccagcaactcccaggaacggcccccaaactcctcatctatagtaatgatcagcggccctcaggggtccctgaccgattctctggctccaagtctggcacctcagcctccctgaccatcagtgggctccagtctgacgatgaggctgatttttactgtgcagcatgggatgataatctgaatggttatgtcttcggaagtgggaccaaggtcaccgtccta

SEQ ID NO: 704 - DNA, 330 bp, Homo Sapien
cagtctgtcgtgacgcagccgccctcagcgtctgggacccccgggcagagggtcaccatctcttgttctggaagcagctccaacatcggaaagaataatgtatactggtaccagcagctcccaggagcggcccccaaactcctcatctatcggaatcatgagcgggcctcaggggtccctgaccgattctctggctccaagtctggcacctcagcctccctggccatcagtgggctccagtctgaggatgaggctgattattactgtgcagcacgggatgacagcctgaacggttatgtcttcggaactgggaccaaggtcaccgtccta

SEQ ID NO: 705 - DNA, 330 bp, Homo Sapien
cagtctgtgctgactcagccaccctcatcatctgggacccccgggcagagggtcaccatctcttgttctggaagcagctccaacatcggaagtaactctgtaaactggtaccaacaactcccaggggcggcccccaaactcctcatctatagtgataatcagcggccctcaggggtccctgaccgattctctgcctccaagtcttacacctcagcctccctggccatcagtgggctccagtctggggatgaggctgattatttctgtgcaacatgggatgacagcctgactggtctagtcttcggcggagggaccaagctgaccgtccta

SEQ ID NO: 706 - DNA, 330 bp, Homo Sapien
caggctgtgctgactcagccgtcctcagcgtctgggacccccgggcagagggtcaccatctcttgttctggaagctactccaacatcggaagtaattatgtatactggtaccagcagctcccaggaacggcccccaaactcctcatctatacgaataatcagcggccctcaggggtccctgaccgattctctggctccaagtctggcacctcagcctcccttgtcatcagtgggctccggtccgacgatgaaggtgattattactgtgcagcatgggatgacagtgtgagtgtcctgttattcggcggggggaccaagctgaccgtccta

SEQ ID NO: 707 - DNA, 330 bp, Homo Sapien
cagtctgtgttgacgcagccgccctcagcgtctgggacccccgggcagagggtcaccatctcttgttctggaagcagttccaacatcggaacttacactgtaaactggtaccagcagcacccaggaacggcccccaagctcctcatctatagtaatgatcagcggccctcaggggtccctgatcgattctctggctccaggtctggcacctcagcctccctggccatcagtggactccggtctgaggatgaggctgattattactgtgcagcatgggatgacagcctacatggctatgtcttcagaactgggaccaagctgaccgtccta

SEQ ID NO: 708 - DNA, 330 bp, Homo Sapien; identical to SEQ ID NO: 649

SEQ ID NO: 709 - DNA, 324 bp, Homo Sapien; identical to SEQ ID NO: 198

SEQ ID NO: 710 - DNA, 330 bp, Homo Sapien
caggctgtgctgactcagccgtcctcagtgtctgggacccccgggcagacggtcaccatctcttgttctggcagcaactccaacatcggaaataattatgtatactggtaccaacaattgccagggtcggcccccaaagtcgtcatctacaggaatcatcagcggccctcaggggtccctgaccgattctctggctccaagtctggcaccgccgcctccctggccatcagtggactccggtccgaagatgaagctgattattattgtgcatcatgggatgacagcctgagtggtctggttttcggcggggggaccaagctgaccgtccta

SEQ ID NO: 711 - DNA, 330 bp, Homo Sapien
cagcctgtgctgactcagcccccctcagcgtctgggacccccgggcagagggtcaccatctcttgttctggaagcagctccaacatcggaagtaatactgtaaactggtaccagcagctcccaggaacggcccccaaactcctcatctatagtaataatcagcggccctcaggggtccctgaccgattctctggctccaagtctggcacctcagcctccctggccatcagtgggctccagtctgaggatgaggctgattattactgtgcagcatgggatgacagcctgaatgatgtggtattcggcggagggaccaagctgaccgtccta

SEQ ID NO: 712 - DNA, 330 bp, Homo Sapien
cagtctgtgctgacgcagccgccctcagcgtctgggaccccggggcagagggtcaccctctcttgttctggaagcagctccaacatcggaagtaatactgtaaactggtaccagcagctcccaggaacggcccccaaagtcctcatctatagtgataatcagcggccctcaggggtccctgaccgattctctggctccaagtctggcacctcagcctccctggccatcagtgggctccagtctgacgatgaggctgtttattactgtgcaggttgggatgacagcctgaatgcttatctcttcggaactgggaccaaggtcaccgtccta

SEQ ID NO: 713 - DNA, 330 bp, Homo Sapien
caggctgtgctgactcagccgtcctcagcgtctgggacccccgggcagagggtcaccatctcttgttctggaagcagctccaacatcggaagttataccgtaaactggtaccagcaggtcccaggaacggcccccaaactcctcatctatagtaataatcagcggccctcaggggtccctgagcgattctctggctccaagtctggcacctcagcctccctggccatcagtgggctccagtctgaggatgaggctgattattactgtgcagcatgggatgacagcctgagtgatgtgctattcggcggagggaccaagctgaccgtccta

SEQ ID NO: 714 - DNA, 330 bp, Homo Sapien
ctgcctgtgctgactcagcccccctcagcgtctgggacccccgggcagagggtcaccatctcttgttctggaagcagctccaacatcggaagtaattctgtaaactggtaccagcaactccccggaacggcccccaaactcctcatctattctaataatcagcggccctcaggggtccctgaccgattctctggctcccagtctggcacctcagcctccctggccatcagtggactccggtccgaggatgaggctgattattactgtgcagcatgggatgacagcctgaataatttggtgttcggcggagggaccaagctgaccgtccta

SEQ ID NO: 715 - DNA, 330 bp, Homo Sapien
cagtctgtgctgacgcagccgccctcagcgtctgcgacccccgggcagacggtcaccatctcttgttctggaagcacctccaacatcggaaataataatgtaaactggtaccagcaggtcccaggaacggcccccaaactcctcatgtacagtaataatcagcggccctcaggggtccctgaccgattctctggctccaggtctggcacctcagcctccctggccatcactgcgctccagtctgaggatgaggctgattattactgtgcaacatgggatgacagcctgagtgcttgggtattcggcggagggaccaaggtcaccgtccta

SEQ ID NO: 716 - DNA, 330 bp, Homo Sapien
ctgcctgtgctgactcagcccccctcagcgtctgggacccccggacagagggtcaccatctcttgttctggaagcagctccaacatcggaagtaatcctgtcaactggtaccagcagctcccaggatcggcccccaaactcctcgtctatagtgatgatcagcggccctcaggggtccctgaccgattctctggctccaagtctggagcctcagcctccctggccatcagtgggctccagtctgaggatgagtctgattattactgtgcagcatgggatgacagcctgaatgctgtggttttcggcggagggaccaaggtcaccgtccta

SEQ ID NO: 717 - DNA, 321 bp, Homo Sapien; identical to SEQ ID NO: 669

SEQ ID NO: 718 - DNA, 330 bp, Homo Sapien
cagtctgtgctgacgcagccgccctcagcgtctgggacccccgggcagagggtcaccatatcttgttctggaagcagctccaacatcggaagtaatactgtaaactggtaccagcagctcccaggaacggcccccaaactcctcatctatagtaataatcagcggccctcaggggtccctgaccgattctctggctccaagtctggcacctcagcctccctggccatcagtgggctccagtctgaggatgaggctgattattactgtgcagcatgggatgacagcctgaatggtctggtgttcggcggagggaccaaggtcaccgtccta

SEQ ID NO: 719 - DNA, 336 bp, Homo Sapien
caggctgtgctgactcagccgtcctcagtgtctggggccccagggcagacggtcaccatctcctgcgctgggagcagctccaacctcggggcaggttatgatgcacactggtatcaacaccttccaggagcagtccccagactcctcatttataataatagtaaacgcccctcaggggtccctgaccgattctctgcctccaagtccggctcctcagcctccctggccatcactgggctccagcctgaggatgaggctgattactactgccagacctatgacaccagactgagcggatcgatgctattcggcggagggaccaaggtcaccgtccta

SEQ ID NO: 720 - DNA, 330 bp, Homo Sapien
cagtctgtgctgacgcagccgccctcagcgtctgggacccccgggcagggggtcaccatctcttgttctggaagcagctccaacatcggaagtaatactgtaaactggtaccagcagctcccaggaacggcccccaaactcctcatctatagtaataatcagcggccctcaggggtccctgaccgattctctggctccaagtctggcacctcagcctccctggccatcagtgggctccagtctgaggatgaggctgattattactgtgctgcatgggatgacagcctgaatggtaaagtcttcggaactgggaccaaggtcaccgtccta

SEQ ID NO: 721 - DNA, 330 bp, Homo Sapien
caggctgtgctgactcagccgtcctcagcgtctgggacccccgggcagagggtcaccatctcttgttctggaagcagctccaacatcggaagttatactgtaaactggtaccagcaggtcccaggaacggcccccaaactcctcatctatagtaataatcagcggccctcaggggtccctgagcgattctctggctccaagtctggcacctcagcctccctggccatcagtgggctccagtctgaggatgaggctgattattactgtgcagcatgggatgacagcctgagtgatgtgctattcggcggagggaccaaggtcaccgtccta

SEQ ID NO: 722 - DNA, 321 bp, Homo Sapien
gacatccagttgacccagtctccttcctccgtgtctgcatctataggcgacacagtcaccatcacttgtcgggcgagccagaatattaacaagtggttagcctggtatcagcagaaaccagggaaagccccttacctcctgatctctactgcttccaatttgcaaagtggggtcccatcaaggttcagcggcactgggtctgggacagctttcactctcaccatcagccgcgtgcagcctgaagattttgcaaattactattgtcaacaggctttcagtttccccatcaccttcggccaagggacacgactggagattaaa

SEQ ID NO: 723 - DNA, 324 bp, Homo Sapien
tcgtctgagctgactcaggaccctgctgtgtctgtggccttgggacagacagtcaggatcacatgccaaggagacagcctcagaagctattatgcaagctggtaccagcagaagccaggacaggcccctgtacttgtcatctatggtaaaaacaaccggccctcagggatcccagaccgattctctggctccagctcaggaaacacagcttccttgaccatcacaggggctcaggcggaagatgaggctgactattactgtaactcccgggacagcagtggtaaccatgtggtattcggcggagggaccaagctgaccgtccta

SEQ ID NO: 724 - protein, 7 aa, Homo Sapien
INPNNGG

SEQ ID NO: 725 - protein, 21 aa, Homo Sapien
ARDLLPYYGDYRADKIDDFDI

SEQ ID NO: 726 - protein, 8 aa, Homo Sapien
GFTFTNSA

SEQ ID NO: 727 - protein, 8 aa, Homo Sapien
GYGFSNYY

SEQ ID NO: 728 - protein, 7 aa, Homo Sapien
INPSDGS

SEQ ID NO: 729 - protein, 12 aa, Homo Sapien
AREKANSMYFDY

SEQ ID NO: 730 - protein, 10 aa, Homo Sapien
GDSISSSSAT

SEQ ID NO: 731 - protein, 8 aa, Homo Sapien
TYYRSKWY

SEQ ID NO: 732 - protein, 10 aa, Homo Sapien
ARQLGGRIEF

SEQ ID NO: 733 - protein, 8 aa, Homo Sapien
GFTFSSYA

SEQ ID NO: 734 - protein, 7 aa, Homo Sapien
ISGSGGS

SEQ ID NO: 735 - protein, 8 aa, Homo Sapien
ATEPPFDI

SEQ ID NO: 736 - protein, 8 aa, Homo Sapien
GYTFTDYF

SEQ ID NO: 737 - protein, 7 aa, Homo Sapien
INPNTGG

SEQ ID NO: 738 - protein, 21 aa, Homo Sapien
ARGAYDYVWGSHRYVADAFDI

SEQ ID NO: 739 - protein, 8 aa, Homo Sapien
GFTFGNYV

SEQ ID NO: 740 - protein, 8 aa, Homo Sapien
ITEGGGDF

SEQ ID NO: 741 - protein, 15 aa, Homo Sapien
AKSGGDDNSNYNFEY

SEQ ID NO: 742 - protein, 8 aa, Homo Sapien
GYTFTDFY

SEQ ID NO: 743 - protein, 7 aa, Homo Sapien
INSKSGD

SEQ ID NO: 744 - protein, 21 aa, Homo Sapien
ARGAYDYVWGSSRYVADAFDI

SEQ ID NO: 745 - protein, 8 aa, Homo Sapien
GYTFTGYY

SEQ ID NO: 746 - protein, 7 aa, Homo Sapien
ISPNSGV

SEQ ID NO: 747 - protein, 13 aa, Homo Sapien
AREGREDGVLFDY

SEQ ID NO: 748 - protein, 8 aa, Homo Sapien
GYSFTDYY

SEQ ID NO: 749 - protein, 14 aa, Homo Sapien
ATDGPPGTGNAFDI

SEQ ID NO: 750 - protein, 8 aa, Homo Sapien
GYTFPDFY

SEQ ID NO: 751 - protein, 7 aa, Homo Sapien
INSNSGS

SEQ ID NO: 752 - protein, 21 aa, Homo Sapien
ARGAYDYVWGTSRYVADAFDI

SEQ ID NO: 753 - protein, 8 aa, Homo Sapien
GFTFTGYY

SEQ ID NO: 754 - protein, 7 aa, Homo Sapien
VDPYNGA

SEQ ID NO: 755 - protein, 8 aa, Homo Sapien
ARGWELDS

SEQ ID NO: 756 - protein, 7 aa, Homo Sapien
ASDSFDH

SEQ ID NO: 757 - protein, 7 aa, Homo Sapien
VSDSFDH

SEQ ID NO: 758 - protein, 8 aa, Homo Sapien
GYTFTKYY

SEQ ID NO: 759 - protein, 7 aa, Homo Sapien
INPTNGY

SEQ ID NO: 760 - protein, 12 aa, Homo Sapien
TRSYSNYDSFDI

SEQ ID NO: 761 - protein, 8 aa, Homo Sapien
GYTFSSFG

SEQ ID NO: 762 - protein, 7 aa, Homo Sapien
VSPYSGD

SEQ ID NO: 763 - protein, 15 aa, Homo Sapien
ANSPISDGSSSSYDN

SEQ ID NO: 764 - protein, 8 aa, Homo Sapien
GYTFTDNY

SEQ ID NO: 765 - protein, 7 aa, Homo Sapien
INVNSGA

SEQ ID NO: 766 - protein, 11 aa, Homo Sapien
ARDFRYSGVDV

SEQ ID NO: 767 - protein, 7 aa, Homo Sapien
IIPGFGK

SEQ ID NO: 768 - protein, 15 aa, Homo Sapien
ARDRGPDIGVAHFDS

SEQ ID NO: 769 - protein, 8 aa, Homo Sapien
GYTFTDHY

SEQ ID NO: 770 - protein, 7 aa, Homo Sapien
MNPKSGG

SEQ ID NO: 771 - protein, 21 aa, Homo Sapien
ASDPTIPPSPNYDYYYYAMDL

SEQ ID NO: 772 - protein, 8 aa, Homo Sapien
GGSMTSNF

SEQ ID NO: 773 - protein, 6 aa, Homo Sapien
VLYTGS

SEQ ID NO: 774 - protein, 9 aa, Homo Sapien
ARGNGWYLP

SEQ ID NO: 775 - protein, 8 aa, Homo Sapien
GHTFTNYA

SEQ ID NO: 776 - protein, 7 aa, Homo Sapien
INADNGN

SEQ ID NO: 777 - protein, 11 aa, Homo Sapien
ARDPWSGVLDH

SEQ ID NO: 778 - protein, 8 aa, Homo Sapien
GYSFRSYG

SEQ ID NO: 779 - protein, 20 aa, Homo Sapien
VRGDRHYDILTGYSPVWFDP

SEQ ID NO: 780 - protein, 8 aa, Homo Sapien
GYTFNDYY

SEQ ID NO: 781 - protein, 7 aa, Homo Sapien
INPHTGV

SEQ ID NO: 782 - protein, 20 aa, Homo Sapien
ARERSEWRNTVSSPSEYFHH

SEQ ID NO: 783 - protein, 8 aa, Homo Sapien
GYTFTTNS

SEQ ID NO: 784 - protein, 7 aa, Homo Sapien
INPRDGS

SEQ ID NO: 785 - protein, 19 aa, Homo Sapien
ARDGLDYRDTSRILAPTDV

SEQ ID NO: 786 - protein, 8 aa, Homo Sapien
GYKFTDYY

SEQ ID NO: 787 - protein, 7 aa, Homo Sapien
VDPTDDE

SEQ ID NO: 788 - protein, 9 aa, Homo Sapien
IRGIAALAD

SEQ ID NO: 789 - protein, 8 aa, Homo Sapien
GYIFGTYA

SEQ ID NO: 790 - protein, 7 aa, Homo Sapien
INAGTGN

SEQ ID NO: 791 - protein, 17 aa, Homo Sapien
TRGDYYDSRGYYNRFDY

SEQ ID NO: 792 - protein, 11 aa, Homo Sapien
AAWDDSLNGWV

SEQ ID NO: 793 - protein, 8 aa, Homo Sapien
RSNIGSNA

SEQ ID NO: 794 - protein, 11 aa, Homo Sapien
SSWDDSLNGLE

SEQ ID NO: 795 - protein, 11 aa, Homo Sapien
GSWDDSLSGVV

SEQ ID NO: 796 - protein, 8 aa, Homo Sapien
SSNIGRNS

SEQ ID NO: 797 - protein, 9 aa, Homo Sapien
RSNIGAGYD

SEQ ID NO: 798 - protein, 11 aa, Homo Sapien
ATWDDSLSGWV

SEQ ID NO: 799 - protein, 8 aa, Homo Sapien
HSNIGNFY

SEQ ID NO: 800 - protein, 11 aa, Homo Sapien
STWDRSLSASV

SEQ ID NO: 801 - protein, 8 aa, Homo Sapien
GSNIGSNT

SEQ ID NO: 802 - protein, 11 aa, Homo Sapien
AAWDDSLNGWL

SEQ ID NO: 803 - protein, 9 aa, Homo Sapien
SRDVGAYNY

SEQ ID NO: 804 - protein, 10 aa, Homo Sapien
SSYAGSDSWV

SEQ ID NO: 805 - protein, 8 aa, Homo Sapien
SGSIGSSY

SEQ ID NO: 806 - protein, 9 aa, Homo Sapien
QSYDANNRV

SEQ ID NO: 807 - protein, 8 aa, Homo Sapien
SSNIGNDV

SEQ ID NO: 808 - protein, 11 aa, Homo Sapien
AVWDDSLDGWV

SEQ ID NO: 809 - protein, 11 aa, Homo Sapien
AAWDDSLNGHI

SEQ ID NO: 810 - protein, 8 aa, Homo Sapien
SSNIGANY

SEQ ID NO: 811 - protein, 11 aa, Homo Sapien
ATWDDSLNGFV

SEQ ID NO: 812 - protein, 8 aa, Homo Sapien
SSNIASNS

SEQ ID NO: 813 - protein, 11 aa, Homo Sapien
AAWDDNLYGVV

SEQ ID NO: 814 - protein, 8 aa, Homo Sapien
SSNIGNNY

SEQ ID NO: 815 - protein, 12 aa, Homo Sapien
GGWDDSLSGQVV

SEQ ID NO: 816 - protein, 11 aa, Homo Sapien
AAWDDSLNGKV

SEQ ID NO: 817 - protein, 8 aa, Homo Sapien
TSNIGGNP

SEQ ID NO: 818 - protein, 11 aa, Homo Sapien
ASWDDSLGGVV

SEQ ID NO: 819 - protein, 11 aa, Homo Sapien
ATWDDSLNAWV

SEQ ID NO: 820 - protein, 8 aa, Homo Sapien
SFNIGNNA

SEQ ID NO: 821 - protein, 8 aa, Homo Sapien
TSNIGDNT

SEQ ID NO: 822 - protein, 11 aa, Homo Sapien
AAWDDSRNGYV

SEQ ID NO: 823 - protein, 11 aa, Homo Sapien
AAWDDSLNGGV

SEQ ID NO: 824 - protein, 9 aa, Homo Sapien
SSNTGAGYY

SEQ ID NO: 825 - protein, 11 aa, Homo Sapien
QSYDRSLSGWV

SEQ ID NO: 826 - protein, 8 aa, Homo Sapien
SSNIGTNY

SEQ ID NO: 827 - protein, 9 aa, Homo Sapien
SSNIGSPYD

SEQ ID NO: 828 - protein, 11 aa, Homo Sapien
QTYDSTLNGAV

SEQ ID NO: 829 - protein, 8 aa, Homo Sapien
SSNIGGNY

SEQ ID NO: 830 - protein, 11 aa, Homo Sapien
AAWDDSLHGVI

SEQ ID NO: 831 - protein, 6 aa, Homo Sapien
SLRSNY

SEQ ID NO: 832 - protein, 11 aa, Homo Sapien
HSRGSSGNHKV

SEQ ID NO: 833 - protein, 6 aa, Homo Sapien
QGISSW

SEQ ID NO: 834 - protein, 9 aa, Homo Sapien
QQSYSTPWT

SEQ ID NO: 835 - protein, 9 aa, Homo Sapien
SSNLGAGYD

SEQ ID NO: 836 - protein, 12 aa, Homo Sapien
QTYDTRLSGSML

SEQ ID NO: 837 - protein, 8 aa, Homo Sapien
SSNIGSYT

SEQ ID NO: 838 - protein, 11 aa, Homo Sapien
AAWDDSLSDVL

SEQ ID NO: 839 - protein, 8 aa, Homo Sapien
NSNIGNNY

SEQ ID NO: 840 - protein, 11 aa, Homo Sapien
ASWDDSLSGLV

SEQ ID NO: 841 - protein, 11 aa, Homo Sapien
AAWDDSLNDVV

SEQ ID NO: 842 - protein, 11 aa, Homo Sapien
AGWDDSLNAYL

SEQ ID NO: 843 - protein, 11 aa, Homo Sapien
AAWDDSLNNLV

SEQ ID NO: 844 - protein, 8 aa, Homo Sapien
TSNIGNNN

SEQ ID NO: 845 - protein, 11 aa, Homo Sapien
ATWDDSLSAWV

SEQ ID NO: 846 - protein, 9 aa, Homo Sapien
SSNIGAGND

SEQ ID NO: 847 - protein, 12 aa, Homo Sapien
QSYDSSLGGSDV

SEQ ID NO: 848 - protein, 8 aa, Homo Sapien
SSNIGGNT

SEQ ID NO: 849 - protein, 11 aa, Homo Sapien
AAWDDFLNGKV

SEQ ID NO: 850 - protein, 8 aa, Homo Sapien
SSNIGSNG

SEQ ID NO: 851 - protein, 11 aa, Homo Sapien
AAWDDSLNDYV

SEQ ID NO: 852 - protein, 8 aa, Homo Sapien
GSNIGRNA

SEQ ID NO: 853 - protein, 11 aa, Homo Sapien
ATWDDSLNDYV

SEQ ID NO: 854 - protein, 9 aa, Homo Sapien
GSNIGAGYD

SEQ ID NO: 855 - protein, 8 aa, Homo Sapien
SSNIGINY

SEQ ID NO: 856 - protein, 11 aa, Homo Sapien
AAWDDSQNAVV

SEQ ID NO: 857 - protein, 8 aa, Homo Sapien
GSNIGKNT

SEQ ID NO: 858 - protein, 11 aa, Homo Sapien
AAWDDSLNDMV

SEQ ID NO: 859 - protein, 12 aa, Homo Sapien
QSYDTRLSDSVI

SEQ ID NO: 860 - protein, 6 aa, Homo Sapien
NIGTKS

SEQ ID NO: 861 - protein, 11 aa, Homo Sapien
YSADNTGDQRM

SEQ ID NO: 862 - protein, 8 aa, Homo Sapien
SSNLGINT

SEQ ID NO: 863 - protein, 8 aa, Homo Sapien
SSSIGSNT

SEQ ID NO: 864 - protein, 6 aa, Homo Sapien
AIERKS

SEQ ID NO: 865 - protein, 13 aa, Homo Sapien
QVWDTSSGHDAVV

SEQ ID NO: 866 - protein, 8 aa, Homo Sapien
SSNIGKYI

SEQ ID NO: 867 - protein, 11 aa, Homo Sapien
ASWDDSLNVVV

SEQ ID NO: 868 - protein, 8 aa, Homo Sapien
SSNIENNI

SEQ ID NO: 869 - protein, 11 aa, Homo Sapien
AAWDDSLKAVV

SEQ ID NO: 870 - protein, 6 aa, Homo Sapien
QNINKW

SEQ ID NO: 871 - protein, 6 aa, Homo Sapien
QNINKW

SEQ ID NO: 872 - protein, 9 aa, Homo Sapien
QQAFSFPIT

SEQ ID NO: 873 - protein, 6 aa, Homo Sapien
SLRSYY

SEQ ID NO: 874 - protein, 11 aa, Homo Sapien
NSRDSSGNHVV

SEQ ID NO: 875 - protein, 8 aa, Homo Sapien
TSNIGKNT

SEQ ID NO: 876 - protein, 11 aa, Homo Sapien
AAWDDSLDGLV

SEQ ID NO: 877 - protein, 11 aa, Homo Sapien
ATWDAGLSVLI

SEQ ID NO: 878 - protein, 8 aa, Homo Sapien
FSNIGSNN

SEQ ID NO: 879 - protein, 12 aa, Homo Sapien
AVRDDSLSGHYV

SEQ ID NO: 880 - protein, 6 aa, Homo Sapien
KLGDKY

SEQ ID NO: 881 - protein, 11 aa, Homo Sapien
QAWDSNTDHVI

SEQ ID NO: 882 - protein, 9 aa, Homo Sapien
SDINLETSR

SEQ ID NO: 883 - protein, 6 aa, Homo Sapien
YQSDSD

SEQ ID NO: 884 - protein, 9 aa, Homo Sapien
MIWHSGGSV

SEQ ID NO: 885 - protein, 8 aa, Homo Sapien
SSNIGKNN

SEQ ID NO: 886 - protein, 11 aa, Homo Sapien
AARDDSLNGYV

SEQ ID NO: 887 - protein, 8 aa, Homo Sapien
SSNIGTYT

SEQ ID NO: 888 - protein, 11 aa, Homo Sapien
AAWDDSLHGYV

SEQ ID NO: 889 - protein, 8 aa, Homo Sapien
RSNIGSNT

SEQ ID NO: 890 - protein, 11 aa, Homo Sapien
AAWDDNLNGYV

SEQ ID NO: 891 - protein, 8 aa, Homo Sapien
HSNIRSND

SEQ ID NO: 892 - protein, 11 aa, Homo Sapien
ATWDDSLSGVV

SEQ ID NO: 893 - protein, 11 aa, Homo Sapien
ATWDDSLTGLV

SEQ ID NO: 894 - DNA, 318 bp, Homo Sapien
cagcccaaggccaaccccaccgtgaccctgttccccccatcttctgaggagctgcaagccaacaaggccaccctggtgtgcctgatctctgacttctaccctggcgctgtgacagtggcctggaaggctgatggctctcctgtgaaggctggcgtggagaccaccaagccatctaagcagtctaacaacaagtatgctgcctcttcttacctgtctctgacccctgagcagtggaagagccaccggtcttactcttgccaggtgacccatgagggctctacagtggagaagacagtggcccccacagagtgctcttga

SEQ ID NO: 895 - DNA, 324 bp, Homo Sapien
cgtacggtggctgcaccatctgtcttcatcttcccgccatctgatgagcagttgaaatctggaactgcctctgttgtgtgcctgctgaataacttctatcccagagaggccaaagtacagtggaaggtggataacgccctccaatcgggtaactcccaggagagtgtcacagagcaggacagcaaggacagcacctacagcctcagcagcaccctgacgctgagcaaagcagactacgagaaacacaaagtctacgcctgcgaagtcacccatcagggcctgagctcgcccgtcacaaagagcttcaacaggggagagtgttag

SEQ ID NO: 896 - DNA, 993 bp, Homo Sapien
gcatccaccaagggcccatctgtcttccccctggccccatcctccaagagcacctctggcggcacagctgccctgggctgcctggtgaaggactacttccctgagcctgtgacagtgtcctggaactctggcgccctgaccagcggcgtgcacaccttccctgctgtgctccagtcctctggcctgtactccctgagcagcgtggtgacagtgccatccagcagcctgggcacccagacctacatctgcaatgtgaaccacaagcccagcaacaccaaggtggacaagcgggtggagcccaagtcctgtgacaagacccacacctgccccccatgccccgcccctgagctgctgggcggcccatctgtcttcctgttcccccccaagcccaaggacaccctgatgatctcccggacccccgaggtgacctgtgtggtggtggatgtgagccatgaggaccccgaggtgaagttcaactggtatgtggatggcgtggaggtgcacaacgccaagaccaagccccgggaggagcagtacaacagcacctaccgggtggtgagcgtgctgacagtgctgcatcaggactggctgaatggcaaggagtacaagtgcaaggtgtccaacaaggccctgcctgcccccattgagaagaccatctccaaggccaagggccagccccgggagccccaggtctacaccctgcccccctcccgggaggagatgaccaagaaccaggtgagcctgacctgcctggtgaagggcttctaccccagcgacattgctgtggagtgggagagcaacggccagcctgagaacaactacaagaccaccccccctgtgctggactctgatggctccttcttcctgtacagcaagctgacagtggacaagagccggtggcagcagggcaatgtcttctcctgctctgtgatgcatgaggccctgcacaaccactacacccagaagagcctgtccctgtcccccggcaagtga

SEQ ID NO: 897 - protein, 105 aa, Homo Sapien
QPKANPTVTLFPPSSEELQANKATLVCLISDFYPGAVTVAWKADGSPVKAGVETTKPSKQSNNKYAASSYLSLTPEQWKSHRSYSCQVTHEGSTVEKTVAPTECS

SEQ ID NO: 898 - protein, 107 aa, Homo Sapien [sequence omitted]

SEQ ID NO: 899 - protein, 330 aa, Homo Sapien
ASTKGPSVFPLAPSSKSTSGGTAALGCLVKDYFPEPVTVSWNSGALTSGVHTFPAVLQSSGLYSLSSVVTVPSSSLGTQTYICNVNHKPSNTKVDKRVEPKSCDKTHTCPPCPAPELLGGPSVFLFPPKPKDTLMISRTPEVTCVVVDVSHEDPEVKFNWYVDGVEVHNAKTKPREEQYNSTYRVVSVLTVLHQDWLNGKEYKCKVSNKALPAPIEKTISKAKGQPREPQVYTLPPSREEMTKNQVSLTCLVKGFYPSDIAVEWESNGQPENNYKTTPPVLDSDGSFFLYSKLTVDKSRWQQGNVFSCSVMHEALHNHYTQKSLSLSPGK

SEQ ID NO: 900 - DNA, 60 bp, Homo Sapien
atgagtgtgcccactcaggtcctggggttgctgctgctgtggcttacagatgccagatgc

SEQ ID NO: 901 - DNA, 57 bp, Homo Sapien
atggaatggagctgggtctttctcttcttcctgtcagtaactacaggtgtccactcg

SEQ ID NO: 902 - protein, 20 aa, Homo Sapien
MSVPTQVLGLLLLWLTDARC

SEQ ID NO: 903 - protein, 19 aa, Homo Sapien
MEWSWVFLFFLSVTTGVHS

SEQ ID NO: 904 - protein, 452 aa, Homo Sapien
EVQLVQSGAEVKKPGSSVKVSCKASGGTFSSFAFSWVRQAPGQGLDWMGRIIPILGRTNYAQKFQGRVTFTADTSTSTVYMELSSLSSEDTAVYYCARDREYSLSLGGSDYWGQGTLVTVSSASTKGPSVFPLAPSSKSTSGGTAALGCLVKDYFPEPVTVSWNSGALTSGVHTFPAVLQSSGLYSLSSVVTVPSSSLGTQTYICNVNHKPSNTKVDKRVEPKSCDKTHTCPPCPAPELLGGPSVFLFPPKPKDTLMISRTPEVTCVVVDVSHEDPEVKFNWYVDGVEVHNAKTKPREEQYNSTYRVVSVLTVLHQDWLNGKEYKCKVSNKALPAPIEKTISKAKGQPREPQVYTLPPSREEMTKNQVSLTCLVKGFYPSDIAVEWESNGQPENNYKTTPPVLDSDGSFFLYSKLTVDKSRWQQGNVFSCSVMHEALHNHYTQKSLSLSPGK

SEQ ID NO: 905 - protein, 217 aa, Homo Sapien
QAVLTQPSSVSGAPGQRVTISCIGSSSNIGAGYDVHWYRQPPGTAPQLLIYANTNRPSGVPDRFSGSRSGTSASLAITGIQAEDEADYYCQSYDSSLSGRVFGGGTKVTVLGQPKAAPSVTLFPPSSEELQANKATLVCLISDFYPGAVTVAWKADSSPVKAGVETTTPSKQSNNKYAASSYLSLTPEQWKSHRSYSCQVTHEGSTVEKTVAPTECS

SEQ ID NO: 906 - protein, 455 aa, Homo Sapien
EVQLQLVETGGGLVQPVGSLRLSCAASGFSFDNYAMSWVRQAPGKGLEWVSSISGSGGQIFYADSVKGRFTISRDNAKNTLVLQMNSLRVDDTAVYYCARDFYRTPGYNTNWGYWGRGTMVTVSSASTKGPSVFPLAPSSKSTSGGTAALGCLVKDYFPEPVTVSWNSGALTSGVHTFPAVLQSSGLYSLSSVVTVPSSSLGTQTYICNVNHKPSNTKVDKRVEPKSCDKTHTCPPCPAPELLGGPSVFLFPPKPKDTLMISRTPEVTCVVVDVSHEDPEVKFNWYVDGVEVHNAKTKPREEQYNSTYRVVSVLTVLHQDWLNGKEYKCKVSNKALPAPIEKTISKAKGQPREPQVYTLPPSREEMTKNQVSLTCLVKGFYPSDIAVEWESNGQPENNYKTTPPVLDSDGSFFLYSKLTVDKSRWQQGNVFSCSVMHEALHNHYTQKSLSLSPGK

SEQ ID NO: 907 - protein, 212 aa, Homo Sapien
SYVLTQPPSVSVSPGETASISCSGDGLGNKYVAWYQQKPGQSPVLVIQQDSKRPSGIPERFSGSNSGDTATLTISGTQSLDEGDYYCQAWDRPAVIFGGGTKLTVLGQPKAAPSVTLFPPSSEELQANKATLVCLISDFYPGAVTVAWKADSSPVKAGVETTTPSKQSNNKYAASSYLSLTPEQWKSHRSYSCQVTHEGSTVEKTVAPTECS

SEQ ID NO: 908 - protein, 449 aa, Homo Sapien
EVQLLESGGGLVQPGGSLRLSCAASGFTFSSYAMSWVRQAPGKGLEWVSAISGSGGSTYYADSVKGRFTISRDNSKNTLYLQMNSLRAEDTAVYYCARHGHSSGYFVYWGKGTMVTVSSASTKGPSVFPLAPSSKSTSGGTAALGCLVKDYFPEPVTVSWNSGALTSGVHTFPAVLQSSGLYSLSSVVTVPSSSLGTQTYICNVNHKPSNTKVDKRVEPKSCDKTHTCPPCPAPELLGGPSVFLFPPKPKDTLMISRTPEVTCVVVDVSHEDPEVKFNWYVDGVEVHNAKTKPREEQYNSTYRVVSVLTVLHQDWLNGKEYKCKVSNKALPAPIEKTISKAKGQPREPQVYTLPPSREEMTKNQVSLTCLVKGFYPSDIAVEWESNGQPENNYKTTPPVLDSDGSFFLYSKLTVDKSRWQQGNVFSCSVMHEALHNHYTQKSLSLSPGK

SEQ ID NO: 909 - protein, 217 aa, Homo Sapien
QAVLTQPSSVSGAPGQRVTISCTGTSSNIGAPYDVNWYQQLPGIAPKLLISGNTNRPSGVPDRFSGSKSGASASLAITGLQADDEADYYCQSYDHSLSGWVFGGGTKVTVLGQPKAAPSVTLFPPSSEELQANKATLVCLISDFYPGAVTVAWKADSSPVKAGVETTTPSKQSNNKYAASSYLSLTPEQWKSHRSYSCQVTHEGSTVEKTVAPTECS

SEQ ID NO: 910 - protein, 454 aa, Homo Sapien
EVQLWESGGGLVQPGGSLRLSCAASGFTFSSYAMSWVRQAPGKGLEWVSAISGSGGSTYYADSVKGRFTISRDNSKNTLYLQMNSLRAEDTAVYYCARSQLPYCGGDCYGSDYWGRGTMVTVSSASTKGPSVFPLAPSSKSTSGGTAALGCLVKDYFPEPVTVSWNSGALTSGVHTFPAVLQSSGLYSLSSVVTVPSSSLGTQTYICNVNHKPSNTKVDKRVEPKSCDKTHTCPPCPAPELLGGPSVFLFPPKPKDTLMISRTPEVTCVVVDVSHEDPEVKFNWYVDGVEVHNAKTKPREEQYNSTYRVVSVLTVLHQDWLNGKEYKCKVSNKALPAPIEKTISKAKGQPREPQVYTLPPSREEMTKNQVSLTCLVKGFYPSDIAVEWESNGQPENNYKTTPPVLDSDGSFFLYSKLTVDKSRWQQGNVFSCSVMHEALHNHYTQKSLSLSPGK

SEQ ID NO: 911 - protein, 211 aa, Homo Sapien
QAVLTQPSSVSVSPGQTASITCSGDKLGDKYASWYQQRPGQSPLLVIYKDSERPSGIPERFSGSSAGNTATLTISGTQPMDEADYYCQAWDSGAVFGGGTKVTVLGQPKAAPSVTLFPPSSEELQANKATLVCLISDFYPGAVTVAWKADSSPVKAGVETTTPSKQSNNKYAASSYLSLTPEQWKSHRSYSCQVTHEGSTVEKTVAPTECS

SEQ ID NO: 912 - protein, 458 aa, Homo Sapien
QVQLVQSGAEVKKPGESLRISCKASGYTFTDYYLHWVRQAPGKGLEWMGWLNPNSGGTNYAQKFQGRVTMTRDTSISTAYMELSRLRSDDTAVYFCARGAYDYVWGTSRYVADAFDIWGQGTMVTVSSASTKGPSVFPLAPSSKSTSGGTAALGCLVKDYFPEPVTVSWNSGALTSGVHTFPAVLQSSGLYSLSSVVTVPSSSLGTQTYICNVNHKPSNTKVDKRVEPKSCDKTHTCPPCPAPELLGGPSVFLFPPKPKDTLMISRTPEVTCVVVDVSHEDPEVKFNWYVDGVEVHNAKTKPREEQYNSTYRVVSVLTVLHQDWLNGKEYKCKVSNKALPAPIEKTISKAKGQPREPQVYTLPPSREEMTKNQVSLTCLVKGFYPSDIAVEWESNGQPENNYKTTPPVLDSDGSFFLYSKLTVDKSRWQQGNVFSCSVMHEALHNHYTQKSLSLSPGK

SEQ ID NO: 913 - protein, 216 aa, Homo Sapien
QSVLTQPPSASGTPGQRVTISCSGSSSNIGSNTVNWYQRLPGAAPQLLIYNNDQRPSGIPDRFSGSKSGTSGSLVISGLQSEDEADYYCASWDDSLNGRVFGGGTKLTVLGQPKAAPSVTLFPPSSEELQANKATLVCLISDFYPGAVTVAWKADSSPVKAGVETTTPSKQSNNKYAASSYLSLTPEQWKSHRSYSCQVTHEGSTVEKTVAPTECS

SEQ ID NO: 914 - protein, 454 aa, Homo Sapien
EVQLVQSGAEVKKPGSSVKVSCKASGGTLSSSAISWVRQAPGEGLEWMGGIIPMFDSTNYAQKFQGRVTITADESTSTAFMELSSLRSDDTAVYYCGRDPYYDRLSGGGYMDVWGQGTLVTVSSASTKGPSVFPLAPSSKSTSGGTAALGCLVKDYFPEPVTVSWNSGALTSGVHTFPAVLQSSGLYSLSSVVTVPSSSLGTQTYICNVNHKPSNTKVDKRVEPKSCDKTHTCPPCPAPELLGGPSVFLFPPKPKDTLMISRTPEVTCVVVDVSHEDPEVKFNWYVDGVEVHNAKTKPREEQYNSTYRVVSVLTVLHQDWLNGKEYKCKVSNKALPAPIEKTISKAKGQPREPQVYTLPPSREEMTKNQVSLTCLVKGFYPSDIAVEWESNGQPENNYKTTPPVLDSDGSFFLYSKLTVDKSRWQQGNVFSCSVMHEALHNHYTQKSLSLSPGK

SEQ ID NO: 915 - protein, 216 aa, Homo Sapien
SYVLTQPPSVSGALRQTATVTCTGNSSNVGNQGAAWLRQHQGRPPKLLSYRNNDRPSGVSQRFSASTSGNTASLTITGLQSEDEADYFCSAWDSSRSGWVFGGGTKLTVLGQPKAAPSVTLFPPSSEELQANKATLVCLISDFYPGAVTVAWKADSSPVKAGVETTTPSKQSNNKYAASSYLSLTPEQWKSHRSYSCQVTHEGSTVEKTVAPTECS

SEQ ID NO: 916 - protein, 453 aa, Homo Sapien
EVQLVQSGAEVKEPGESLRISCKASGYDFSNYWIAWVRQMPGKGLEWMGIIYPGDSDTRYSPSFQGQVTISVDRSISTAYLQWSSLKASDTALYYCSRPTYWSTTWGREFDYWGQGTLVTVSSASTKGPSVFPLAPSSKSTSGGTAALGCLVKDYFPEPVTVSWNSGALTSGVHTFPAVLQSSGLYSLSSVVTVPSSSLGTQTYICNVNHKPSNTKVDKRVEPKSCDKTHTCPPCPAPELLGGPSVFLFPPKPKDTLMISRTPEVTCVVVDVSHEDPEVKFNWYVDGVEVHNAKTKPREEQYNSTYRVVSVLTVLHQDWLNGKEYKCKVSNKALPAPIEKTISKAKGQPREPQVYTLPPSREEMTKNQVSLTCLVKGFYPSDIAVEWESNGQPENNYKTTPPVLDSDGSFFLYSKLTVDKSRWQQGNVFSCSVMHEALHNHYTQKSLSLSPGK

SEQ ID NO: 917 - protein, 214 aa, Homo Sapien
SYELTQPPSVSVSPGQTATITCSGDALPKKYAYWYQQKSGQAPVLVVYEDSKRPSGIPERFSGSSSGTMATLTISGAQVEDEADYYCYSTDSSGNHWVFGGGTKLTVLGQPKAAPSVTLFPPSSEELQANKATLVCLISDFYPGAVTVAWKADSSPVKAGVETTTPSKQSNNKYAASSYLSLTPEQWKSHRSYSCQVTHEGSTVEKTVAPTECS

SEQ ID NO: 918 - protein, 452 aa, Homo Sapien
QVQLVQSGTEVKKPGASVRVSCKPSADTFTSYYVHWVRQAPGQGLEWMGTINPTGTYTRYAQQFQGRVTVTRDTSTSSVYMELSSLRSEDSAVYYCARDVRPYTAMYSFDNWGRGTTVTVSSASTKGPSVFPLAPSSKSTSGGTAALGCLVKDYFPEPVTVSWNSGALTSGVHTFPAVLQSSGLYSLSSVVTVPSSSLGTQTYICNVNHKPSNTKVDKRVEPKSCDKTHTCPPCPAPELLGGPSVFLFPPKPKDTLMISRTPEVTCVVVDVSHEDPEVKFNWYVDGVEVHNAKTKPREEQYNSTYRVVSVLTVLHQDWLNGKEYKCKVSNKALPAPIEKTISKAKGQPREPQVYTLPPSREEMTKNQVSLTCLVKGFYPSDIAVEWESNGQPENNYKTTPPVLDSDGSFFLYSKLTVDKSRWQQGNVFSCSVMHEALHNHYTQKSLSLSPGK

SEQ ID NO: 919 - protein, 214 aa, Homo Sapien
SYVLTQPPSVSVSPGQTATITCSGDALPKQYANWYQQKPGQAPVLMIYKDSDRPSGIPERFSGSSSGTKATLTISGVQAEDEADYYCQSADNSGTNYVFGTGTKLTVLGQPKAAPSVTLFPPSSEELQANKATLVCLISDFYPGAVTVAWKADSSPVKAGVETTTPSKQSNNKYAASSYLSLTPEQWKSHRSYSCQVTHEGSTVEKTVAPTECS

SEQ ID NO: 920 - DNA, 1355 bp, Homo Sapien
gtgcagctggtgcagtctggggctgaggtgaagaagcctgggtcctcggtgaaggtctcctgcaaggcttctggaggcaccttcagcagctttgctttcagctgggtgcgacaggcccctggacaagggcttgactggatgggaaggatcatccctatacttggtagaacaaactacgcacagaaattccagggcagagtcacctttaccgcggacacatccacgagcacagtctacatggaattgagcagtctgagctctgaggacacggccgtgtattactgtgcgagagaccgggaatatagcttgagtctggggggcagtgactactggggccagggcaccctggtcaccgtctcgagtgcctccaccaagggcccatcggtcttccccctggcaccctcctccaagagcacctctgggggcacagcggccctgggctgcctggtcaaggactacttccccgaaccggtgacggtgtcgtggaactcaggcgccctgacagcggcgtgcacaccttcccggctgtcctacagtcctcaggactctactccctcagcagcgtggtgacagtgccctccagcagcttgggcacccagacctacatctgcaacgtgaatcacaagcccagcaacaccaaggtggacaagagagttgagcccaaatcttgtgacaaaactcacacatgcccaccgtgcccagcacctgaactcctggggggaccgtcagtcttcctcttccccccaaaacccaaggacaccctcatgatctcccggacccctgaggtcacatgcgtggtggtggacgtgagccacgaagaccctgaggtcaagttcaactggtacgtggacggcgtggaggtgcataatgccaagacaaagccgcgggaggagcagtacaacagcacgtaccgtgtggtcagcgtcctcaccgtcctgcaccaggactggctgaatggcaaggagtacaagtgcaaggtctccaacaaagccctcccagcccccatcgagaaaaccatctccaaagccaaagggcagccccgagaaccacaggtgtacaccctgcccccatcccgggaggagatgaccaagaaccaggtcagcctgacctgcctggtcaaaggcttctatcccagcgacatcgccgtggagtgggagagcaatgggcagccggagaacaactacaagaccacgcctcccgtgctggactccgacggctccttcttcctctatagcaagctcaccgtggacaagagcaggtggcagcaggggaacgtcttctcatgctccgtgatgcatgaggctctgcacaaccactacacgcagaagagcctctccctgtctccgggtaaatga

SEQ ID NO: 921 - DNA, 657 bp, Homo Sapien
caggctgtgctgactcagccgtcctcagtgtctggggccccagggcagagggtcaccatctcctgcattgggagcagctccaacatcggggcgggttatgatgtacactggtatcgccagcctccaggaacagccccccaactcctcatctatgcaaacaccaatcggccctctggggtccctgaccgattctctggctcccggtctggcacctcagcctccctggccatcactgggatccaggctgaggatgaggctgattattactgccagtcctacgacagcagcctgagtggcagggtgttcggcggagggaccaaggtcaccgtcctaggtggtcagcccaaggctgccccctcggtcactctgttcccgccctcctctgaggagcttcaagccaacaaggccacactggtgtgtctcataagtgacttctacccgggagccgtgacagtggcctggaaggcagatagcagccccgtcaaggcgggagtggagaccaccacaccctccaaacaaagcaacaacaagtacgcggccagcagctatctgagcctgacgcctgagcagtggaagtcccacagaagctacagctgccaggtcacgcatgaagggagcaccgtggagaagacagtggcccctacagaatgttcatag

SEQ ID NO: 922 - DNA, 1367 bp, Homo Sapien
gaggtgcagctgcagctggtggagactgggggaggcttggtgcagcctgtggggtccctgagactctcctgtgcagcctctggattctcctttgacaactatgccatgagctgggtccgccaggctccagggaagggactggagtgggtctcaagtattagtgggagtggtgggcaaatattctacgcagactccgtgaagggccggttcaccatctccagagacaacgccaagaacacgctggttttgcaaatgaacagcctgagagtcgacgacacggccgtctattactgtgcgagagatttctaccggacccccggttataataccaactggggatactggggcagggggacaatggtcaccgtctcgagtgcctccaccaagggcccatcggtcttccccctggcaccctcctccaagagcacctctgggggcacagcggccctgggctgcctggtcaaggactacttccccgaaccggtgacggtgtcgtggaactcaggcgccctgacagcggcgtgcacaccttcccggctgtcctacagtcctcaggactctactccctcagcagcgtggtgacagtgccctccagcagcttgggcacccagacctacatctgcaacgtgaatcacaagcccagcaacaccaaggtggacaagagagttgagcccaaatcttgtgacaaaactcacacatgcccaccgtgcccagcacctgaactcctggggggaccgtcagtcttcctcttccccccaaaacccaaggacaccctcatgatctcccggacccctgaggtcacatgcgtggtggtggacgtgagccacgaagaccctgaggtcaagttcaactggtacgtggacggcgtggaggtgcataatgccaagacaaagccgcgggaggagcagtacaacagcacgtaccgtgtggtcagcgtcctcaccgtcctgcaccaggactggctgaatggcaaggagtacaagtgcaaggtctccaacaaagccctcccagcccccatcgagaaaaccatctccaaagccaaagggcagccccgagaaccacaggtgtacaccctgcccccatcccgggaggagatgaccaagaaccaggtcagcctgacctgcctggtcaaaggcttctatcccagcgacatcgccgtggagtgggagagcaatgggcagccggagaacaactacaagaccacgcctcccgtgctggactccgacggctccttcttcctctatagcaagctcaccgtggacaagagcaggtggcagcaggggaacgtcttctcatgctccgtgatgcatgaggctctgcacaaccactacacgcagaagagcctctccctgtctccgggtaaatga

SEQ ID NO: 923 - DNA, 642 bp, Homo Sapien
tcctatgtgctgactcagccaccctcagtgtccgtgtccccaggagagacagccagcatctcctgctctggtgatggattggggaataaatatgttgcttggtatcagcagaagccaggccagtcccctgtcctggtcatccagcaagattccaagcggccctcaggaatccctgagcgattctctggctccaattctggggacacagccactctgaccatcagcgggacgcagtctctggatgagggtgactattattgtcaggcgtgggacagacccgctgtgatattcggcggggggaccaagctgaccgtcctaggtggtcagcccaaggctgccccctcggtcactctgttcccgccctcctctgaggagcttcaagccaacaaggccacactggtgtgtctcataagtgacttctacccgggagccgtgacagtggcctggaaggcagatagcagccccgtcaaggcgggagtggagaccaccacaccctccaaacaaagcaacaacaagtacgcggccagcagctatctgagcctgacgcctgagcagtggaagtcccacagaagctacagctgccaggtcacgcatgaagggagcaccgtggagaagacagtggcccctacagaatgttcatag

SEQ ID NO: 924 - DNA, 1349 bp, Homo Sapien
gaggtgcagctgttggagtctgggggaggcttggtacagcctggggggtccctgagactctcctgtgcagcctctggattcacctttagcagctatgccatgagctgggtccgccaggctccagggaaggggctggagtgggtctcagctattagtggtagtggtggtagcacatactacgcagactccgtgaagggccggttcaccatctccagagacaattccaagaacacgctgtatctgcaaatgaacagcctgagagccgaggacacggccgtgtattactgtgcgagacatggccatagcagtggctactttgtctattggggcaaggggacaatggtcaccgtctcgagtgcctccaccaagggcccatcggtcttccccctggcaccctcctccaagagcacctctgggggcacagcggccctgggctgcctggtcaaggactacttccccgaaccggtgacggtgtcgtggaactcaggcgccctgacagcggcgtgcacaccttcccggctgtcctacagtcctcaggactctactccctcagcagcgtggtgacagtgccctccagcagcttgggcacccagacctacatctgcaacgtgaatcacaagcccagcaacaccaaggtggacaagagagttgagcccaaatcttgtgacaaaactcacacatgcccaccgtgcccagcacctgaactcctggggggaccgtcagtcttcctcttccccccaaaacccaaggacaccctcatgatctcccggacccctgaggtcacatgcgtggtggtggacgtgagccacgaagaccctgaggtcaagttcaactggtacgtggacggcgtggaggtgcataatgccaagacaaagccgcgggaggagcagtacaacagcacgtaccgtgtggtcagcgtcctcaccgtcctgcaccaggactggctgaatggcaaggagtacaagtgcaaggtctccaacaaagccctcccagcccccatcgagaaaaccatctccaaagccaaagggcagccccgagaaccacaggtgtacaccctgcccccatcccgggaggagatgaccaagaaccaggtcagcctgacctgcctggtcaaaggcttctatcccagcgacatcgccgtggagtgggagagcaatgggcagccggagaacaactacaagaccacgcctcccgtgctggactccgacggctccttcttcctctatagcaagctcaccgtggacaagagcaggtggcagcaggggaacgtcttctcatgctccgtgatgcatgaggctctgcacaaccactacacgcagaagagcctctccctgtctccgggtaaatga

SEQ ID NO: 925 - DNA, 657 bp, Homo Sapien
caggctgtgctgactcagccgtcctcagtgtctggggccccagggcagagggtcaccatctcctgcactgggacctcctccaacatcggggcaccttatgatgtaaactggtaccaacagctgccaggaatagcccccaaactcctcatctctggtaacaccaatcggccctcaggagtccctgaccgattctctggctccaagtctggcgcctcagcctccctggccatcactgggctccaggctgacgatgaggctgattattactgtcagtcctatgaccacagcctgagtggttgggtgttcggcggcgggaccaaggtcaccgtcctaggtggtcagcccaaggctgccccctcggtcactctgttcccgccctcctctgaggagcttcaagccaacaaggccacactggtgtgtctcataagtgacttctacccgggagccgtgacagtggcctggaaggcagatagcagccccgtcaaggcgggagtggagaccaccacaccctccaaacaaagcaacaacaagtacgcggccagcagctatctgagcctgacgcctgagcagtggaagtcccacagaagctacagctgccaggtcacgcatgaagggagcaccgtggagaagacagtggcccctacagaatgttcatag

SEQ ID NO: 926 - DNA, 1364 bp, Homo Sapien
gaggtgcagctgtgggagtctgggggaggcttggtacagcctggggggtccctgagactctcctgtgcagcctctggattcacctttagcagctatgccatgagctgggtccgccaggctccagggaaggggctggagtgggtctcagctattagtggtagtggtggtagcacatactacgcagactccgtgaagggccggttcaccatctccagagacaattccaagaacacgctgtatctgcaaatgaacagcctgagagccgaggacacggccgtgtattactgtgcgagaagtcagctcccatactgtggtggtgactgctatggtagcgactactggggccgggggacaatggtcaccgtctcgagtgcctccaccaagggcccatcggtcttccccctggcaccctcctccaagagcacctctgggggcacagcggccctgggctgcctggtcaaggactacttccccgaaccggtgacggtgtcgtggaactcaggcgccctgacagcggcgtgcacaccttcccggctgtcctacagtcctcaggactctactccctcagcagcgtggtgacagtgccctccagcagcttgggcacccagacctacatctgcaacgtgaatcacaagcccagcaacaccaaggtggacaagagagttgagcccaaatcttgtgacaaaactcacacatgcccaccgtgcccagcacctgaactcctggggggaccgtcagtcttcctcttccccccaaaacccaaggacaccctcatgatctcccggacccctgaggtcacatgcgtggtggtggacgtgagccacgaagaccctgaggtcaagttcaactggtacgtggacggcgtggaggtgcataatgccaagacaaagccgcgggaggagcagtacaacagcacgtaccgtgtggtcagcgtcctcaccgtcctgcaccaggactggctgaatggcaaggagtacaagtgcaaggtctccaacaaagccctcccagcccccatcgagaaaaccatctccaaagccaaagggcagccccgagaaccacaggtgtacaccctgcccccatcccgggaggagatgaccaagaaccaggtcagcctgacctgcctggtcaaaggcttctatcccagcgacatcgccgtggagtgggagagcaatgggcagccggagaacaactacaagaccacgcctcccgtgctggactccgacggctccttcttcctctatagcaagctcaccgtggacaagagcaggtggcagcaggggaacgtcttctcatgctccgtgatgcatgaggctctgcacaaccactacacgcagaagagcctctccctgtctccgggtaaatga

SEQ ID NO: 927 - DNA, 639 bp, Homo Sapien
caggctgtgctgactcagccgtcctcagtgtccgtgtccccaggacagacagccagcatcacctgctctggagataaattgggagataaatatgcttcctggtatcaacagaggccaggccagtcccctctactggtcatttataaagattccgagcggccctcagggatccctgaacgattctctggctccagcgctgggaatacagccactctgaccatcagcgggacccagcctatggatgaggctgactattactgtcaggcgtgggacagcggtgctgtattcggcggagggaccaaggtcaccgtcctaggtggtcagcccaaggctgccccctcggtcactctgttcccgccctcctctgaggagcttcaagccaacaaggccacactggtgtgtctcataagtgacttctacccgggagccgtgacagtggcctggaaggcagatagcagccccgtcaaggcgggagtggagaccaccacaccctccaaacaaagcaacaacaagtacgcggccagcagctatctgagcctgacgcctgagcagtggaagtcccacagaagctacagctgccaggtcacgcatgaagggagcaccgtggagaagacagtggcccctacagaatgttcatag

SEQ ID NO: 928 - DNA, 1376 bp, Homo Sapien
caggtgcagctggtgcagtctggggcagaggtgaaaaagcccggggagtctctgaggatctcctgtaaggcttctggatacaccttcaccgactactatctgcactgggtgcgacaggcccctggaaaagggcttgagtggatgggatggctcaaccctaacagtggtggcacaaactatgcacagaagtttcagggcagggtcaccatgaccagggacacgtccatcagcacagcctatatggagctgagcaggctgagatctgacgacacggccgtgtatttttgtgcgagaggggcctatgattacgtctgggggacttctcgctatgtcgctgatgctttcgatatctggggccaagggacaatggtcaccgtctcttcagcctccaccaagggcccatcggtcttccccctggcaccctcctccaagagcacctctgggggcacagcggccctgggctgcctggtcaaggactacttccccgaaccggtgacggtgtcgtggaactcaggcgccctgacagcggcgtgcacaccttcccggctgtcctacagtcctcaggactctactccctcagcagcgtggtgacagtgccctccagcagcttgggcacccagacctacatctgcaacgtgaatcacaagcccagcaacaccaaggtggacaagagagttgagcccaaatcttgtgacaaaactcacacatgcccaccgtgcccagcacctgaactcctggggggaccgtcagtcttcctcttccccccaaaacccaaggacaccctcatgatctcccggacccctgaggtcacatgcgtggtggtggacgtgagccacgaagaccctgaggtcaagttcaactggtacgtggacggcgtggaggtgcataatgccaagacaaagccgcgggaggagcagtacaacagcacgtaccgtgtggtcagcgtcctcaccgtcctgcaccaggactggctgaatggcaaggagtacaagtgcaaggtctccaacaaagccctcccagcccccatcgagaaaaccatctccaaagccaaagggcagccccgagaaccacaggtgtacaccctgcccccatcccgggaggagatgaccaagaaccaggtcagcctgacctgcctggtcaaaggcttctatcccagcgacatcgccgtggagtgggagagcaatgggcagccggagaacaactacaagaccacgcctcccgtgctggactccgacggctccttcttcctctatagcaagctcaccgtggacaagagcaggtggcagcaggggaacgtcttctcatgctccgtgatgcatgaggctctgcacaaccactacacgcagaagagcctctccctgtctccgggtaaatga

SEQ ID NO: 929 - DNA, 654 bp, Homo Sapien
cagtctgtgctgactcagccaccctcagcgtctgggacccccgggcagagggtcaccatctcttgttctggaagcagctccaacatcgggagtaacactgtaaactggtaccagcgactcccaggagcggccccccaactcctcatctacaataatgaccagcggccctcagggatccctgaccgattctctggctccaagtctggcacctcaggctccctggtcatcagtgggctccagtctgaagatgaggctgattactactgtgcgtcatgggatgacagtctgaatggtcgggtgttcggcggagggaccaagctgaccgtcctaggtggtcagcccaaggctgccccctcggtcactctgttcccgccctcctctgaggagcttcaagccaacaaggccacactggtgtgtctcataagtgacttctacccgggagccgtgacagtggcctggaaggcagatagcagccccgtcaaggcgggagtggagaccaccacaccctccaaacaaagcaacaacaagtacgcggccagcagctatctgagcctgacgcctgagcagtggaagtcccacagaagctacagctgccaggtcacgcatgaagggagcaccgtggagaagacagtggcccctacagaatgttcatag

SEQ ID NO: 930 - DNA, 1364 bp, Homo Sapien
gaagtgcagctggtgcagtctggggctgaggtgaagaagcctgggtcctcggtgaaggtctcctgcaaggcttctggaggcaccctcagcagttctgctatcagctgggtgcgacaggcccctggagaagggcttgagtggatgggagggatcatccctatgtttgattcaacaaactacgcacagaagttccagggcagagtcaccattaccgcggacgaatcgacgagcacagccttcatggagctgagcagcctgagatctgacgacacggccgtgtattattgtgggagagacccctactatgatcgcctttctgggggggggtacatggacgtctggggccaaggaaccctggtcaccgtctcgagtgcctccaccaagggcccatcggtcttccccctggcaccctcctccaagagcacctctgggggcacagcggccctgggctgcctggtcaaggactacttccccgaaccggtgacggtgtcgtggaactcaggcgccctgacagcggcgtgcacaccttcccggctgtcctacagtcctcaggactctactccctcagcagcgtggtgacagtgccctccagcagcttgggcacccagacctacatctgcaacgtgaatcacaagcccagcaacaccaaggtggacaagagagttgagcccaaatcttgtgacaaaactcacacatgcccaccgtgcccagcacctgaactcctggggggaccgtcagtcttcctcttccccccaaaacccaaggacaccctcatgatctcccggacccctgaggtcacatgcgtggtggtggacgtgagccacgaagaccctgaggtcaagttcaactggtacgtggacggcgtggaggtgcataatgccaagacaaagccgcgggaggagcagtacaacagcacgtaccgtgtggtcagcgtcctcaccgtcctgcaccaggactggctgaatggcaaggagtacaagtgcaaggtctccaacaaagccctcccagcccccatcgagaaaaccatctccaaagccaaagggcagccccgagaaccacaggtgtacaccctgcccccatcccgggaggagatgaccaagaaccaggtcagcctgacctgcctggtcaaaggcttctatcccagcgacatcgccgtggagtgggagagcaatgggcagccggagaacaactacaagaccacgcctcccgtgctggactccgacggctccttcttcctctatagcaagctcaccgtggacaagagcaggtggcagcaggggaacgtcttctcatgctccgtgatgcatgaggctctgcacaaccactacacgcagaagagcctctccctgtctccgggtaaatga

SEQ ID NO: 931 - DNA, 654 bp, Homo Sapien
tcctatgtgctgactcagccaccctcggtgtccggggccttgagacagaccgccacagtcacctgcactgggaacagcagcaatgttggcaaccaaggagcagcttggctgaggcagcaccagggccgccctcccaaacttctatcttacaggaataacgaccggccctcaggggtctcacagagattttctgcttccacgtcagggaacacagcctccctgaccattactggcctccagtctgaggacgaggctgactatttctgctcagcatgggacagcagccgcagtggttgggtcttcggcggagggaccaagctgaccgtcctaggtggtcagcccaaggctgccccctcggtcactctgttcccgccctcctctgaggagcttcaagccaacaaggccacactggtgtgtctcataagtgacttctacccgggagccgtgacagtggcctggaaggcagatagcagccccgtcaaggcgggagtggagaccaccacaccctccaaacaaagcaacaacaagtacgcggccagcagctatctgagcctgacgcctgagcagtggaagtcccacagaagctacagctgccaggtcacgcatgaagggagcaccgtggagaagacagtggcccctacagaatgttcatag

SEQ ID NO: 932 - DNA, 1361 bp, Homo Sapien
gaggtccagctggtgcagtctggagcagaggtgaaagagccgggggagtctctgaggatctcctgtaaggcttctggatatgacttttccaactactggatcgcctgggtgcgccagatgcccgggaaaggcctggagtggatggggatcatctatcctggtgactctgataccagatatagcccgtccttccaaggccaggtcaccatctcagtcgacaggtccatcagcaccgcctacctgcagtggagcagcctgaaggcctcggacaccgccctgtattactgttccagacctacctattggagcaccacttgggggagggagtttgactactggggccaaggcaccctggtcaccgtctcgagtgcctccaccaagggcccatcggtcttccccctggcaccctcctccaagagcacctctgggggcacagcggccctgggctgcctggtcaaggactacttccccgaaccggtgacggtgtcgtggaactcaggcgccctgacagcggcgtgcacaccttcccggctgtcctacagtcctcaggactctactccctcagcagcgtggtgacagtgccctccagcagcttgggcacccagacctacatctgcaacgtgaatcacaagcccagcaacaccaaggtggacaagagagttgagcccaaatcttgtgacaaaactcacacatgcccaccgtgcccagcacctgaactcctggggggaccgtcagtcttcctcttccccccaaaacccaaggacaccctcatgatctcccggacccctgaggtcacatgcgtggtggtggacgtgagccacgaagaccctgaggtcaagttcaactggtacgtggacggcgtggaggtgcataatgccaagacaaagccgcgggaggagcagtacaacagcacgtaccgtgtggtcagcgtcctcaccgtcctgcaccaggactggctgaatggcaaggagtacaagtgcaaggtctccaacaaagccctcccagcccccatcgagaaaaccatctccaaagccaaagggcagccccgagaaccacaggtgtacaccctgcccccatcccgggaggagatgaccaagaaccaggtcagcctgacctgcctggtcaaaggcttctatcccagcgacatcgccgtggagtgggagagcaatgggcagccggagaacaactacaagaccacgcctcccgtgctggactccgacggctccttcttcctctatagcaagctcaccgtggacaagagcaggtggcagcaggggaacgtcttctcatgctccgtgatgcatgaggctctgcacaaccactacacgcagaagagcctctccctgtctccgggtaaatga

SEQ ID NO: 933 - DNA, 648 bp, Homo Sapien
tcctatgagctgactcagccaccctcggtgtcagtgtccccaggacaaacggccacgatcacctgctctggagatgcattgccaaaaaaatatgcttattggtaccagcagaagtcaggccaggcccctgtgctggtcgtctatgaggacagcaaacgaccctccgggatccctgagagattctctggctccagctcagggacaatggccaccttgactatcagtggggcccaggtggaggatgaagctgactactactgttactcaacagacagcagtggtaatcattgggtgttcggcggagggaccaagctgaccgtcctaggtggtcagcccaaggctgccccctcggtcactctgttcccgccctcctctgaggagcttcaagccaacaaggccacactggtgtgtctcataagtgacttctacccgggagccgtgacagtggcctggaaggcagatagcagccccgtcaaggcgggagtggagaccaccacaccctccaaacaaagcaacaacaagtacgcggccagcagctatctgagcctgacgcctgagcagtggaagtcccacagaagctacagctgccaggtcacgcatgaagggagcaccgtggagaagacagtggcccctacagaatgttcatag

SEQ ID NO: 934 - DNA, 1358 bp, Homo Sapien
caggtccagctggtgcagtctgggactgaggtgaagaagcctggggcctcagtgagggtctcctgtaagccatctgcagacaccttcaccagctactatgtgcactgggtgcgacaggcccctggacaagggcttgagtggatgggcacaatcaaccccaccggaacttacacaaggtacgcacagcagttccagggcagagtcaccgtgaccagggacacgtccacgagctcagtgtacatggaattgagcagcctgagatctgaggactcggccgtgtattattgtgcgagagacgtaagaccctatacagctatgtactcctttgacaactgggggcgggggaccacggtcaccgtctcgagtgcctccaccaagggcccatcggtcttccccctggcaccctcctccaagagcacctctgggggcacagcggccctgggctgcctggtcaaggactacttccccgaaccggtgacggtgtcgtggaactcaggcgccctgacagcggcgtgcacaccttcccggctgtcctacagtcctcaggactctactccctcagcagcgtggtgacagtgccctccagcagcttgggcacccagacctacatctgcaacgtgaatcacaagcccagcaacaccaaggtggacaagagagttgagcccaaatcttgtgacaaaactcacacatgcccaccgtgcccagcacctgaactcctggggggaccgtcagtcttcctcttccccccaaaacccaaggacaccctcatgatctcccggacccctgaggtcacatgcgtggtggtggacgtgagccacgaagaccctgaggtcaagttcaactggtacgtggacggcgtggaggtgcataatgccaagacaaagccgcgggaggagcagtacaacagcacgtaccgtgtggtcagcgtcctcaccgtcctgcaccaggactggctgaatggcaaggagtacaagtgcaaggtctccaacaaagccctcccagcccccatcgagaaaaccatctccaaagccaaagggcagccccgagaaccacaggtgtacaccctgcccccatcccgggaggagatgaccaagaaccaggtcagcctgacctgcctggtcaaaggcttctatcccagcgacatcgccgtggagtgggagagcaatgggcagccggagaacaactacaagaccacgcctcccgtgctggactccgacggctccttcttcctctatagcaagctcaccgtggacaagagcaggtggcagcaggggaacgtcttctcatgctccgtgatgcatgaggctctgcacaaccactacacgcagaagagcctctccctgtctccgggtaaatga

SEQ ID NO: 935 - DNA, 648 bp, Homo Sapien
tcctatgtgctgactcagccaccctcggtgtcagtgtccccaggacagacggccacgatcacctgctctggagatgcattgccaaagcaatatgctaattggtaccagcagaaaccaggccaggcccctgtgttaatgatatataaagacagtgacaggccctcagggatccctgagcgattctctggctccagctcagggacaaaagccacgttgaccatcagtggagtccaggcagaagacgaggctgactattactgtcaatcagcagacaacagtggtactaattatgtcttcggaactgggaccaagctgaccgtcctaggtggtcagcccaaggctgccccctcggtcactctgttcccgccctcctctgaggagcttcaagccaacaaggccacactggtgtgtctcataagtgacttctacccgggagccgtgacagtggcctggaaggcagatagcagccccgtcaaggcgggagtggagaccaccacaccctccaaacaaagcaacaacaagtacgcggccagcagctatctgagcctgacgcctgagcagtggaagtcccacagaagctacagctgccaggtcacgcatgaagggagcaccgtggagaagacagtggcccctacagaatgttcatag

SEQ ID NO: 936 - protein, 8 aa, Homo Sapien
GGTFSSFA

SEQ ID NO: 937 - protein, 10 aa, Homo Sapien
IIPILGRTNY

SEQ ID NO: 938 - protein, 16 aa, Homo Sapien
ARDREYSLSLGGSDYW

SEQ ID NO: 939 - protein, 4 aa, Homo Sapien
ANTN

SEQ ID NO: 940 - protein, 11 aa, Homo Sapien
QSYDSSLSGRV

SEQ ID NO: 941 - protein, 7 aa, Homo Sapien
GFSFDNY

SEQ ID NO: 942 - protein, 10 aa, Homo Sapien
ISGSGGQIFY

SEQ ID NO: 943 - protein, 17 aa, Homo Sapien
ARDFYRTPGYNTNWGYW

SEQ ID NO: 944 - protein, 6 aa, Homo Sapien
GLGNKY

SEQ ID NO: 945 - protein, 4 aa, Homo Sapien
QDSK

SEQ ID NO: 946 - protein, 9 aa, Homo Sapien
QAWDRPAVI

SEQ ID NO: 947 - protein, 10 aa, Homo Sapien
ISGSGGSTYY

SEQ ID NO: 948 - protein, 13 aa, Homo Sapien
ARHGHSSGYFVYW

SEQ ID NO: 949 - protein, 9 aa, Homo Sapien
SSNIGAPYD

SEQ ID NO: 950 - protein, 4 aa, Homo Sapien
GNTN

SEQ ID NO: 951 - protein, 11 aa, Homo Sapien
QSYDHSLSGWV

SEQ ID NO: 952 - protein, 10 aa, Homo Sapien
ISGSGGSTYY

SEQ ID NO: 953 - protein, 18 aa, Homo Sapien
ARSQLPYCGGDCYGSDYW

SEQ ID NO: 954 - protein, 4 aa, Homo Sapien
KDSE

SEQ ID NO: 955 - protein, 8 aa, Homo Sapien
QAWDSGAV

SEQ ID NO: 956 - protein, 10 aa, Homo Sapien
LNPNSGGTNY

SEQ ID NO: 957 - protein, 21 aa, Homo Sapien
ARGYDYVWGTSRYVADAFDIW

SEQ ID NO: 958 - protein, 4 aa, Homo Sapien
NNDQ

SEQ ID NO: 959 - protein, 8 aa, Homo Sapien
GGTLSSSA

SEQ ID NO: 960 - protein, 10 aa, Homo Sapien
IIPMFDSTNY

SEQ ID NO: 961 - protein, 18 aa, Homo Sapien
GRDPYYDRLSGGGYMDVW

SEQ ID NO: 962 - protein, 8 aa, Homo Sapien
SSNVGNQG

SEQ ID NO: 963 - protein, 4 aa, Homo Sapien
RNND

SEQ ID NO: 964 - protein, 11 aa, Homo Sapien
SAWDSSRSGWV

SEQ ID NO: 965 - protein, 8 aa, Homo Sapien
GYDFSNYW

SEQ ID NO: 966 - protein, 10 aa, Homo Sapien
IYPGDSDTRY

SEQ ID NO: 967 - protein, 17 aa, Homo Sapien
SRPTYWSTTWGREFDYW

SEQ ID NO: 968 - protein, 6 aa, Homo Sapien
ALPKKY

SEQ ID NO: 969 - protein, 4 aa, Homo Sapien
EDSK

SEQ ID NO: 970 - protein, 11 aa, Homo Sapien
YSTDSSGNHWV

SEQ ID NO: 971 - protein, 8 aa, Homo Sapien
ADTFTSYY

SEQ ID NO: 972 - protein, 10 aa, Homo Sapien
INPTGTYTRY

SEQ ID NO: 973 - protein, 16 aa, Homo Sapien
ARDVRPYTAMYSFDNW

SEQ ID NO: 974 - protein, 6 aa, Homo Sapien
ALPKQY

SEQ ID NO: 975 - protein, 4 aa, Homo Sapien
KDSD

SEQ ID NO: 976 - protein, 11 aa, Homo Sapien
QSADNSGTNYV
